(19) United States
(12) Patent Application Publication
(10) Pub. No.: US 2022/0170044 A1
(43) Pub. Date: Jun. 2, 2022

(54) TRANSPOSON-BASED MODIFICATIONS OF IMMUNE CELLS

(71) Applicants: DNA Twopointo, Inc., Newark, CA (US); The General Hospital Corporation, Boston, MA (US)

(72) Inventors: Mark Cobbold, Winchester, MA (US); Maggie Lee, San Jose, CA (US); Jeremy Minshull, Los Altos, CA (US); Feng Shi, Winchester, MA (US); Yifang Shui, Boston, MA (US)

(73) Assignees: DNA Twopointo, Inc., Newark, CA (US); The General Hospital Corporation, Boston, MA (US)

(21) Appl. No.: 17/429,342

(22) PCT Filed: Feb. 7, 2020
(86) PCT No.: PCT/US20/17283

§ 371 Date: Aug. 8, 2021

Related U.S. Application Data
(60) Provisional application No. 62/803,142, filed on Feb. 8, 2019.

(51) Int. Cl. C12N 15/86; C07K 14/47; A61K 35/17; C07K 14/705; C07K 14/725

(52) U.S. Cl. CPC C12N 15/86; C07K 14/4705; A61K 35/17; C07K 14/4747; C12N 2740/16043; C07K 14/7051; C07K 14/70578; C12N 2800/90; C07K 14/70521

(57) ABSTRACT

The present invention provides methods and compositions for stable genetic modification of immune cells. The genetic modifications can be used to produce immune cells for therapeutic or diagnostic purposes.

### CROSS REFERENCE TO RELATED APPLICATIONS

[0001] The present application claims priority from 62/803,142 filed Feb. 8, 2019, incorporated by reference in its entirety for all purposes.

### REFERENCE TO A SEQUENCE LISTING

[0002] The application refers to sequences disclosed in a txt file named ST25_20200128, of 889,000 bytes, created Jan. 28, 2020, incorporated by reference.

### BACKGROUND OF THE INVENTION

[0003] Genetic modification of immune cells can be used to modify their properties. Genetically modifiable immune cell properties include the molecules that are recognized by the immune cell, cellular responses within the immune cell, the ability of the immune cell to survive under certain environmental conditions, and the proteins produced by the immune cell. Genetic modifications of immune cells can be used to improve their disease-targeting response. By enhancing the function of specific immune cells, the immune response may be augmented, for example to achieve long-lasting cancer regression.

[0004] Stable genetic modifications of immune cells can be made by integrating a heterologous polynucleotide into the genome of the immune cell. Heterologous DNA may be introduced into immune cells in different ways: by transfecting with naked plasmid DNA, by packaging the DNA into viral particles used to infect the immune cells, or by introducing into immune cells a transposon and its cognate transposase.

[0005] Non-viral vector systems, including plasmid DNA, generally suffer from inefficient cellular delivery, pronounced cellular toxicity and limited duration of transgene expression due to the lack of genomic insertion and resulting degradation and/or dilution of the vector in transfected cell populations. Transgenes delivered by non-viral approaches often form long, repeated arrays (concatemers) that are targets for transcriptional silencing by heterochromatin formation.

[0006] Viral packaging generally imposes limits on the size of the DNA that can be inserted into the viral vector. Some viruses (such as AAV) are retained as non-replicated episomes that are therefore diluted out as cells divide. For viruses that integrate their genomes into the target cell genome there are safety concerns regarding viral integration sites. For all viral delivery methods there are concerns about the costs of viral manufacture and potential immunogenicity of viral components.

[0007] Transposons provide an alternative delivery system that is as simple to manufacture and non-immunogenic as naked DNA, but highly efficient at integrating into the target cell genome. Transposons comprise two ends that are recognized by a transposase. The transposase acts on the transposon to excise it from one DNA molecule and integrate it into another: this process is referred to as transposition. The DNA between the two transposon ends is transposed by the transposase along with the transposon ends. Heterologous DNA flanked by a pair of transposon ends, such that it is recognized and transposed by a transposase is referred to herein as a synthetic transposon. Introduction of a synthetic transposon and a corresponding transposase into the nucleus of a eukaryotic cell may result in transposition of the transposon into the genome of the cell. Transposon/transposase gene delivery platforms have the potential to overcome the limitations of naked DNA and viral delivery. In particular, the piggyBac-like transposons are attractive because of their unlimited gene cargo capacity.

[0008] The expression levels of genes encoded on a polynucleotide integrated into the genome of a cell depend on the configuration of sequence elements within the polynucleotide. The efficiency of integration and thus the number of copies of the polynucleotide that are integrated into each genome, and the genomic loci where integration occurs also influence the expression levels of genes encoded on the polynucleotide. The efficiency with which a polynucleotide may be integrated into the genome of a target cell can often be increased by placing the polynucleotide into a transposon.

[0009] Transposition by a piggyBac-like transposase is perfectly reversible. The transposon is integrated at an integration target sequence in a recipient DNA molecule, during which the target sequence becomes duplicated at each end of the transposon inverted terminal repeats (ITRs). Subsequent transposition removes the transposon and restores the recipient DNA to its former sequence, with the target sequence duplication and the transposon removed. However, this is not sufficient to remove a transposon from a genome into which it has been integrated, as it is highly likely that the transposon will be excised from the first integration target sequence but integrated into a second integration target sequence in the genome. Transposases that are deficient for the integration function, on the other hand, can excise the transposon from the first target sequence, but will be unable to integrate into a second target sequence. Integration-deficient transposases are thus useful for reversing the genomic integration of a transposon.

### SUMMARY OF THE INVENTION

[0010] Transposons capable of stably modifying the genome of immune cells are an aspect of the invention. Genes that are advantageous in modifying immune cells to enhance their function are an aspect of the invention. Methods for modifying immune cells to enhance their function are an aspect of the invention.

[0011] Methods for modifying the genomes of immune cells are described. Immune cells include lymphocytes such as T-cells and B-cells and natural killer cells, T-helper cells, antigen-presenting cells, dendritic cells, neutrophils and macrophages. Modifications include enhancing the ability of an immune cell to survive and/or proliferate under certain conditions or in certain environments, altering the amount or type of proteins expressed on the immune cell surface, and altering the response of the immune cell to proteins or small molecules that contact the cell. Sequences of polynucleotide constructs for effecting genomic modifications of immune cells are provided and are an aspect of the invention.

[0012] The ability to enhance the function, persistence and proliferation of human T-cells is a current bottle neck for cancer immunotherapy. Technologies that allow improved performance, expansion and genetic manipulation of T-cells are in high demand. The ability to control and expand T-cells has many applications, including the following. (i) Improving the function of T-cell therapy for greater efficacy and or safety, for example in combination with CAR-T. (ii) Reversing T-cell exhaustion and/or restimulation-induced cell death of tumor infiltrating T-cells, allowing T-cells to survive and function within the tumor microenvironment. (iii) Improving the survival of human T-cells in mice for preclinical study (in vivo). (iv) Identification of antigen-specific T-cells and cloning T-cell receptors in vitro. (v) Developing T-cell lines that can be maintained ex-vivo, and that still perform biological functions of T-cells (such as cell killing).

[0013] Immune cell survival-enhancing genes include anti-apoptotic genes such as Survivin, Bcl2, Bcl6, Bcl-XL and genes encoding mutants of the normal apoptotic pathway that exert a dominant negative effect such as dominant negative mutants of Casp3, Casp7, Casp8, Casp9 or Casp10. Immune cell survival-enhancing genes also include activating mutants of STAT3, including STAT3 mutants comprising one of the following mutations: F174S, H410R, S614R, E616K, G618R, Y640F, N6471, E652K, K658Y, K658R, K658N, K658M, K658R, K658H, K658N, D661Y or D661V. Immune cell survival-enhancing genes also include activating mutants of CD28, including CD28 mutants comprising one of the following mutations: D124E, D124V, T1951 or T195P. Immune cell survival-enhancing genes also include activating mutants of RhoA, including RhoA mutants comprising one of the following mutations: G17V or K18N. Immune cell survival-enhancing genes also include activating mutants of phospholipase C gamma, including phospholipase C gamma mutants comprising one of the following mutations: S345F, S520F or R707Q. Immune cell survival-enhancing genes also include activating mutants of STAT5B, including STAT5B mutants comprising one of the following mutations: N642H, T648S, S652Y, Y665F or P267A. Immune cell survival-enhancing genes also include activating mutants of CCND1, including CCND1 mutants comprising one of the following mutations: E36G, E36Q, E36K, A39S, S41L, S41P, S41T, V42E, V42A, V42L, V42M, Y44S, Y44D, Y44C, Y44H, K46T, K46R, K46N, K46E, C47G, C47R, C47S, C47W, P199R, P199S, P199L, S201F, T2851, T285A, P286L, P286H, P286S, P286T or P286A.

[0014] Immune cell survival-enhancing genes also include enhanced signaling receptor (ESR) wherein the ESR comprises a sequence derived from the extracellular domain of a receptor that normally transmits an inhibitory signal to an immune cell, a sequence derived from the intracellular domain of an intracellular domain of a receptor that transmits a stimulatory signal to an immune cell and a transmembrane domain. Exemplary extracellular domains include a human protein selected from TNFRSF3 (LTRβ), TNFRSF6 (Fas), TNFRSF8 (CD30), TNFRSF10A (DR4), TNFRSF10B (DR5), TNFRSF19 (TROY), TNFRSF21 (DR6) and CTLA4, such as SEQ ID NOs: 322-340. Exemplary intracellular domains include a human protein selected from TNFRSF4 (OX40), TNFRSF5 (CD40), TNFRSF7 (CD27), TNFRSF9 (4-1BB), TNFRSF11A (RANK), TNFRSF13B (TACI), TNFRSF13C (BAFF-R), TNFRSF14 (HVEM), TNFRSF17 (CD269), TNFRSF18 (GITR), CD28, CD28H (TMIGD2), Inducible T-cell Costimulator (ICOS/CD278), DNAX Accessory Molecule-1 (DNAM-1/CD226), Signaling Lymphocytic Activation Molecule (SLAM/CD150), T-cell Immunoglobulin and Mucin domain (TIM-1/HAVcr-1), interferon receptor alpha chain (IFNAR1), interferon receptor beta chain IFNAR2), interleukin-2 receptor beta subunit (IL2RB), interleukin-2 receptor gamma subunit (IL2RG), Tumor Necrosis Factor Superfamily 14 (TNFSF14/LIGHT), Natural Killer Group 2 member D (NKG2D/CD314) and CD40 ligand (CD40L), such as SEQ ID NOs: 341-364. Exemplary transmembrane domains include a human protein selected from 365-396. Exemplary enhanced signaling receptors include sequences comprising a sequence selected from SEQ ID NOs: 274-318.

[0015] Preferably immune cell survival-enhancing genes are provided to immune cells using transposon vectors. Transposons are efficiently integrated into an immune cell genome by a corresponding transposase. Several different classes of transposons are useful for integrating genes into the genome of an immune cell. PiggyBac-like transposons such as the looper moth piggyBac transposon which comprises ITR sequences comprising SEQ ID NO: 18 and 19, or the piggyBat transposon which comprises ITR sequences comprising SEQ ID NO: 20 and 21, or the Xenopus piggyBac-like transposon which comprises ITR sequences comprising SEQ ID NO: 6 and 7, or the Bombyx piggyBac-like transposon which comprises ITR sequences comprising SEQ ID NO: 14 and 15 can all be transposed by a corresponding transposase into an immune cell genome. Also, Mariner type transposons such as Sleeping Beauty which comprises ITRs comprising SEQ ID NO: 26 and 27 can be transposed by a corresponding transposase into an immune cell genome. Also hAT type transposons such as TcBuster which comprises ITRs comprising SEQ ID NO: 399 and 400 can be transposed by a corresponding transposase into an immune cell genome. Any of these transposons may be used to integrate survival-enhancing genes into an immune cell genome. A transposon may be introduced into an immune cell with a corresponding transposase. The transposase may be provided as protein, or as a nucleic acid encoding the transposase such as an mRNA molecule or a DNA molecule with a sequence encoding the transposase operably linked to a promoter expressible in the immune cell. Other genes may also be introduced into the immune cell to modify its function. For example, genes encoding receptors that allow the immune cell to bind to antigens on the surface of a target cell may be introduced. Genes that can be used to kill the immune cell may also be introduced. The benefit of using a transposon to deliver combinations of genes to the immune cell is that a transposase typically integrates all of the DNA between the transposon ITRs into the genome of the immune cell. Thus multiple genes can be introduced simultaneously.

[0016] It is feasible to integrate immune cell survival genes into the genome of an immune cell precursor such as a stem cell, and then differentiate the immune cell precursor into an immune cell. Such manipulations are expressly contemplated. To enhance survival of the immune cell, a survival-enhancing gene should be operably linked to a promoter such that the survival-enhancing gene is expressible in the immune cell. Exemplary promoters include an EF1 promoter, a PGK promoter, a GAPDH promoter, an EEF2 promoter, a ubiquitin promoter, an SV40 promoter or an HSVTK promoter, such as a promoter selected from SEQ ID NOs 94-154.

[0017] Modified human immune cells are an aspect of the invention. In addition, animal immune cells that have been modified to enhance their survival or proliferation are also of value as experimental models and as animal therapeutic agents. Modified immune cells from mammals including primates, rodents, cats, dogs and horses are an aspect of the invention.

### BRIEF DESCRIPTION OF THE FIGURES

[0018] FIG. 1. FACS analysis of Jurkat human T-cell line transfected with Xenopus or Bombyx piggyBac-like gene transfer systems. Human Jurkat cells were transfected with transposases and corresponding transposons comprising a CD19 gene as described in Section 6.1.1. After 70 days, CD19-expressing cells were selected using a FACS sorter and grown in culture for a further 85 days. Cells were then stained for CD19 and analyzed on a FACS. Panel A: Cells originally transfected with transposon with sequence given by SEQ ID NO: 223 were analyzed for CD19 (y-axis) and GFP (x-axis). Panel B: Cells originally transfected with transposon with sequence given by SEQ ID NO: 224 were analyzed for CD19 (y-axis) and RFP (x-axis).

[0019] FIG. 2. FACS analysis of primary T-cells transfected with a gene encoding a mutated STAT3. Human primary T-cells were co-transfected with a transposase and a corresponding transposon comprising a gene encoding a mutated version of STAT3: STAT3-Y640F, and a gene encoding a green fluorescent protein (GFP). Panel A: Cells were cultured for various times (indicated at the top), after which samples were taken, labelled with a fluorescently-labelled anti-CD8 antibody and analyzed using a fluorescence-activated cell sorter. CD8 expressed on the surface of T-cells is shown on the y-axis, GFP (which indicates the presence of the transposon comprising the STAT3 Y640F gene) is shown along the x-axis. Panel B: the fraction of CD8+ cells showing GFP fluorescence was calculated from the data shown in Panel A.

[0020] FIG. 3. FACS analysis of a mixture of transfected primary T-cells and cells from a JY B-cell line. Human primary T-cells were co-transfected with a transposase and one of three corresponding transposons comprising a gene encoding a chimeric antigen receptor with sequence given by SEQ ID NO: 229 and a GFP reporter as described in Section 6.2.1.3. One transposon comprised no further genes (Panels A and D), one transposon further comprised a gene encoding Survivin (Panels B and E) and one transposon further comprised a gene encoding CD28-D124E-T195P (Panels C and F). Cells were cultured for approximately 5 weeks, at which point approximately 10% of the T-cells were expressing GFP. At that point 200,000 T-cells (=20,000 GFP-expressing T-cells) were mixed with 200,000 cells of the JY transformed B-cell line. Three days (Panels A, C and E) or 7 days (Panels B, D and F) post-mixing, cells were labelled with fluorescently-labelled anti-CD8 and anti-CD19 antibodies and analyzed using a fluorescence-activated cell sorter. CD8 expressed on the surface of T-cells is shown on the y-axis, CD19 expressed on the surface of the JY cells is shown on the x-axis.

[0021] FIG. 4. FACS analysis of primary T-cells transfected with genes encoding Bcl-2 and Bel-6. Human primary T-cells were co-transfected with a transposase and a corresponding transposon comprising a gene encoding Bcl2 and Bcl6, and a gene encoding a green fluorescent protein (GFP). Panel A: Cells were cultured for various times (indicated at the top), after which samples were taken, labelled with a fluorescently-labelled anti-CD8 antibody and analyzed using a fluorescence-activated cell sorter. CD8 expressed on the surface of T-cells is shown on the y-axis, GFP (which indicates the presence of the transposon comprising the Bcl2-2A-Bcl6 gene) is shown along the x-axis. Panel B: the fraction of CD8+ cells showing GFP fluorescence was calculated from the data shown in Panel A.

[0022] FIG. 5. FACS analysis of primary T-cells from 3 donors transfected with a gene encoding Bcl-XL. Human primary T-cells were co-transfected with a transposase and a corresponding transposon comprising a gene encoding Bcl-XL, and a gene encoding a green fluorescent protein (GFP). Cells were grown in culture for 240 days, stained with a fluorescently-labeled antibody against human CD8 and analyzed on a flow cytometer. Panel A: Donor 81; Panel A: Donor 82; Panel A: Donor 84. CD8 expressed on the surface of T-cells is shown on the y-axis, GFP (which indicates the presence of the transposon comprising the Bcl-XL gene) is shown along the x-axis.

### DESCRIPTION

### Definitions

[0023] Use of the singular forms “a,” “an,” and “the” include plural references unless the context clearly dictates otherwise. Thus, for example, reference to “a polynucleotide” includes a plurality of polynucleotides, reference to “a substrate” includes a plurality of such substrates, reference to “a variant” includes a plurality of variants, and the like.

[0024] Terms such as “connected,” “attached,” “linked,” and “conjugated” are used interchangeably herein and encompass direct as well as indirect connection, attachment, linkage or conjugation unless the context clearly dictates otherwise. Where a range of values is recited, it is to be understood that each intervening integer value, and each fraction thereof, between the recited upper and lower limits of that range is also specifically disclosed, along with each subrange between such values. The upper and lower limits of any range can independently be included in or excluded from the range, and each range where either, neither or both limits are included is also encompassed within the invention. Where a value being discussed has inherent limits, for example where a component can be present at a concentration of from 0 to 100%, or where the pH of an aqueous solution can range from 1 to 14, those inherent limits are specifically disclosed. Where a value is explicitly recited, it is to be understood that values which are about the same quantity or amount as the recited value are also within the scope of the invention. Where a combination is disclosed, each sub combination of the elements of that combination is also specifically disclosed and is within the scope of the invention. Conversely, where different elements or groups of elements are individually disclosed, combinations thereof are also disclosed. Where any element of an invention is disclosed as having a plurality of alternatives, examples of that invention in which each alternative is excluded singly or in any combination with the other alternatives are also hereby disclosed; more than one element of an invention can have such exclusions, and all combinations of elements having such exclusions are hereby disclosed.

[0025] Unless defined otherwise herein, all technical and scientific terms used herein have the same meaning as commonly understood by one of ordinary skill in the art to which this invention belongs. Singleton, et al., Dictionary of Microbiology and Molecular Biology, 2nd Ed., John Wiley and Sons, New York (1994), and Hale & Marham, The Harper Collins Dictionary of Biology, Harper Perennial, N Y, 1991, provide one of skill with a general dictionary of many of the terms used in this invention. Although any methods and materials similar or equivalent to those described herein can be used in the practice or testing of the present invention, the preferred methods and materials are described. Unless otherwise indicated, nucleic acids are written left to right in 5′ to 3′ orientation; amino acid sequences are written left to right in amino to carboxy orientation, respectively. The terms defined immediately below are more fully defined by reference to the specification as a whole.

[0026] The “configuration” of a polynucleotide means the functional sequence elements within the polynucleotide, and the order and direction of those elements.

[0027] The terms “corresponding transposon” and “corresponding transposase” are used to indicate an activity relationship between a transposase and a transposon. A transposase transposases its corresponding transposon.

[0028] The term “counter-selectable marker” means a polynucleotide sequence that confers a selective disadvantage on a host cell. Examples of counter-selectable markers include sacB, rpsL, tetAR, pheS, thyA, gata-1, ccdB, kid and barnase (Bernard, 1995, Journal/Gene, 162: 159-160; Bernard et al., 1994. Journal/Gene, 148: 71-74; Gabant et al., 1997, Journal/Biotechniques, 23: 938-941; Gababt et al., 1998, Journal/Gene, 207: 87-92; Gababt et al., 2000, Journal/Biotechniques, 28: 784-788; Galvao and de Lorenzo, 2005, Journal/Appl Environ Microbiol, 71: 883-892; Hartzog et al., 2005, Journal/Yeat, 22:789-798; Knipfer et al., 1997, Journal/Plasmid, 37: 129-140; Reyrat et al., 1998, Journal/Infect Immun, 66: 4011-4017; Soderholm et al., 2001, Journal/Biotechniques, 31: 306-310, 312; Tamura et al., 2005, Journal/Appl Environ Microbiol, 71: 587-590; Yazynin et al., 1999, Journal/FEBS Lett, 452: 351-354). Counter-selectable markers often confer their selective disadvantage in specific contexts. For example, they may confer sensitivity to compounds that can be added to the environment of the host cell, or they may kill a host with one genotype but not kill a host with a different genotype. Conditions which do not confer a selective disadvantage on a cell carrying a counter-selectable marker are described as “permissive”. Conditions which do confer a selective disadvantage on a cell carrying a counter-selectable marker are described as “restrictive”.

[0029] The term “coupling element” or “translational coupling element” means a DNA sequence that allows the expression of a first polypeptide to be linked to the expression of a second polypeptide. Internal ribosome entry site elements (IRES elements) and cis-acting hydrolase elements (CHYSEL elements) are examples of coupling elements.

[0030] The terms “DNA sequence”, “RNA sequence” or “polynucleotide sequence” mean a contiguous nucleic acid sequence. The sequence can be an oligonucleotide of 2 to 20 nucleotides in length to a full length genomic sequence of thousands or hundreds of thousands of base pairs.

[0031] The term “Enhanced Signaling Receptor” (or “ESR”) means a protein in which the extracellular/ligand binding domain of a receptor that transmits an inhibitory signal to an immune cell, is fused to the intracellular domain of a receptor that transmits a stimulatory signal.

[0032] The term “expression construct” means any polynucleotide designed to transcribe an RNA. For example, a construct that contains at least one promoter which is or may be operably linked to a downstream gene, coding region, or polynucleotide sequence (for example, a cDNA or genomic DNA fragment that encodes a polypeptide or protein, or an RNA effector molecule, for example, an antisense RNA, triplex-forming RNA, ribozyme, an artificially selected high affinity RNA ligand (aptamer), a double-stranded RNA, for example, an RNA molecule comprising a stem-loop or hairpin dsRNA, or a bi-finger or multi-finger dsRNA or a microRNA, or any RNA). An “expression vector” is a polynucleotide comprising a promoter which can be operably linked to a second polynucleotide. Transfection or transformation of the expression construct into a recipient cell allows the cell to express an RNA effector molecule, polypeptide, or protein encoded by the expression construct. An expression construct may be a genetically engineered plasmid, virus, recombinant virus, or an artificial chromosome derived from, for example, a bacteriophage, adenovirus, adeno-associated virus, retrovirus, lentivirus, poxvirus, or herpesvirus. Such expression vectors can include sequences from bacteria, viruses or phages. Such vectors include chromosomal, episomal and virus-derived vectors, for example, vectors derived from bacterial plasmids, bacteriophages, yeast episomes, yeast chromosomal elements, and viruses, vectors derived from combinations thereof, such as those derived from plasmid and bacteriophage genetic elements, cosmids and phagemids. An expression construct can be replicated in a living cell, or it can be made synthetically. For purposes of this application, the terms “expression construct”, “expression vector”, “vector”, and “plasmid” are used interchangeably to demonstrate the application of the invention in a general, illustrative sense, and are not intended to limit the invention to a particular type of expression construct.

[0033] The term “expression polypeptide” means a polypeptide encoded by a gene on an expression construct.

[0034] The term “expression system” means any in vivo or in vitro biological system that is used to produce one or more gene product encoded by a polynucleotide.

[0035] A “gene transfer system” comprises a vector or gene transfer vector, or a polynucleotide comprising the gene to be transferred which is cloned into a vector (a “gene transfer polynucleotide” or “gene transfer construct”). A gene transfer system may also comprise other features to facilitate the process of gene transfer. For example, a gene transfer system may comprise a vector and a lipid or viral packaging mix for enabling a first polynucleotide to enter a cell, or it may comprise a polynucleotide that includes a transposon and a second polynucleotide sequence encoding a corresponding transposase to enhance productive genomic integration of the transposon. The transposases and transposons of a gene transfer system may be on the same nucleic acid molecule or on different nucleic acid molecules. The transposase of a gene transfer system may be provided as a polynucleotide or as a polypeptide.

[0036] Two elements are “heterologous” to one another if not naturally associated. For example, a nucleic acid sequence encoding a protein linked to a heterologous promoter means a promoter other than that which naturally drives expression of the protein. A heterologous nucleic acid flanked by transposon ends or ITRs means a heterologous nucleic acid not naturally flanked by those transposon ends or ITRs, such as a nucleic acid encoding a polypeptide other than a transposase, including an antibody heavy or light chain. A nucleic acid is heterologous to a cell if not naturally found in the cell or if naturally found in the cell but in a different location (e.g., episomal or different genomic location) than the location described.

[0037] The term “host” means any prokaryotic or eukaryotic organism that can be a recipient of a nucleic acid. A “host,” as the term is used herein, includes prokaryotic or eukaryotic organisms that can be genetically engineered. For examples of such hosts, see Maniatis et al., Molecular Cloning. A Laboratory Manual, Cold Spring Harbor Laboratory, Cold Spring Harbor, N.Y. (1982). As used herein, the terms “host,” “host cell,” “host system” and “expression host” can be used interchangeably.

[0038] An “IRES” or “internal ribosome entry site” means a specialized sequence that directly promotes ribosome binding, independent of a cap structure.

[0039] An ‘isolated’ polypeptide or polynucleotide means a polypeptide or polynucleotide that has been either removed from its natural environment, produced using recombinant techniques, or chemically or enzymatically synthesized. Polypeptides or polynucleotides of this invention may be purified, that is, essentially free from any other polypeptide or polynucleotide and associated cellular products or other impurities.

[0040] The terms “nucleoside” and “nucleotide” include those moieties which contain not only the known purine and pyrimidine bases, but also other heterocyclic bases which have been modified. Such modifications include methylated purines or pyrimidines, acylated purines or pyrimidines, or other heterocycles. Modified nucleosides or nucleotides can also include modifications on the sugar moiety, for example, where one or more of the hydroxyl groups are replaced with halogen, aliphatic groups, or is functionalized as ethers, amines, or the like. The term “nucleotidic unit” is intended to encompass nucleosides and nucleotides.

[0041] An “Open Reading Frame” or “ORF” means a portion of a polynucleotide that, when translated into amino acids, contains no stop codons. The genetic code reads DNA sequences in groups of three base pairs, which means that a double-stranded DNA molecule can read in any of six possible reading frames-three in the forward direction and three in the reverse. An ORF typically also includes an initiation codon at which translation may start.

[0042] The term “operably linked” refers to functional linkage between two sequences such that one sequence modifies the behavior of the other. For example, a first polynucleotide comprising a nucleic acid expression control sequence (such as a promoter, IRES sequence, enhancer or array of transcription factor binding sites) and a second polynucleotide are operably linked if the first polynucleotide affects transcription and/or translation of the second polynucleotide. Similarly, a first amino acid sequence comprising a secretion signal, or a subcellular localization signal and a second amino acid sequence are operably linked if the first amino acid sequence causes the second amino acid sequence to be secreted or localized to a subcellular location.

[0043] The term “overhang” or “DNA overhang” means the single-stranded portion at the end of a double-stranded DNA molecule. Complementary overhangs are those which will base-pair with each other.

[0044] A “piggyBac-like transposase” means a transposase with at least 20% sequence identity as identified using the TBLASTN algorithm to the piggyBac transposase from Trichoplusia ni (SEQ ID NO: 30), and as more fully described in Sakar, A. et. al., (2003). Mol. Gen. Genomics 270: 173-180. “Molecular evolutionary analysis of the widespread piggyBac transposon family and related ‘domesticated’ species”, and further characterized by a DDE-like DDD motif, with aspartate residues at positions corresponding to D268, D346, and D447 of Trichoplusia ni piggyBac transposase on maximal alignment. PiggyBac-like transposases are also characterized by their ability to excise their transposons precisely with a high frequency. A “piggyBac-like transposon” means a transposon having transposon ends which are the same or at least 80% and preferably at least 90, 95, 96, 97, 98 or 99% identical to the transposon ends of a naturally occurring transposon that encodes a piggyBac-like transposase. A piggyBac-like transposon includes an inverted terminal repeat (ITR) sequence of approximately 12-16 bases at each end. These repeats may be identical at the two ends, or the repeats at the two ends may differ at 1 or 2 or 3 or 4 positions in the two ITRs. The transposon is flanked on each side by a 4 base sequence corresponding to the integration target sequence which is duplicated on transposon integration (the Target Site Duplication or Target Sequence Duplication or TSD).

[0045] The terms “polynucleotide,” “oligonucleotide,” “nucleic acid” and “nucleic acid molecule” and “gene” are used interchangeably to refer to a polymeric form of nucleotides of any length, and may comprise ribonucleotides, deoxyribonucleotides, analogs thereof, or mixtures thereof. This term refers only to the primary structure of the molecule. Thus, the term includes triple-, double- and single-stranded deoxyribonucleic acid (“DNA”), as well as triple-, double- and single-stranded ribonucleic acid (“RNA”). It also includes modified, for example by alkylation, and/or by capping, and unmodified forms of the polynucleotide. More particularly, the terms “polynucleotide,” “oligonucleotide,” “nucleic acid” and “nucleic acid molecule” include polydeoxyribonucleotides (containing 2-deoxy-D-ribose), polyribonucleotides (containing D-ribose), including tRNA, rRNA, hRNA, siRNA and mRNA, whether spliced or unspliced, any other type of polynucleotide which is an N- or C-glycoside of a purine or pyrimidine base, and other polymers containing nonnucleotidic backbones, for example, polyamide (for example, peptide nucleic acids (“PNAs”)) and polymorpholino (commercially available from the Anti-Virals, Inc., Corvallis, Oreg., as Neugene) polymers, and other synthetic sequence-specific nucleic acid polymers providing that the polymers contain nucleobases in a configuration which allows for base pairing and base stacking, such as is found in DNA and RNA. There is no intended distinction in length between the terms “polynucleotide,” “oligonucleotide,” “nucleic acid” and “nucleic acid molecule,” and these terms are used interchangeably herein. These terms refer only to the primary structure of the molecule. Thus, these terms include, for example, 3′-deoxy-2′, 5′-DNA, oligodeoxyribonucleotide N3′ P5′ phosphoramidates, 2′-O-alkyl-substituted RNA, double- and single-stranded DNA, as well as double- and single-stranded RNA, and hybrids thereof including for example hybrids between DNA and RNA or between PNAs and DNA or RNA, and also include known types of modifications, for example, labels, alkylation, “caps,” substitution of one or more of the nucleotides with an analog, internucleotide modifications such as, for example, those with uncharged linkages (for example, methyl phosphonates, phosphotriesters, phosphoramidates, carbamates, or the like) with negatively charged linkages (for example, phosphorothioates, phosphorodithioates, or the like), and with positively charged linkages (for example, aminoalkylphosphoramidates, aminoalkylphosphotriesters), those containing pendant moieties, such as, for example, proteins (including enzymes (for example, nucleases), toxins, antibodies, signal peptides, poly-L-lysine, or the like), those with intercalators (for example, acridine, psoralen, or the like), those containing chelates (of, for example, metals, radioactive metals, boron, oxidative metals, or the like), those containing alkylators, those with modified linkages (for example, alpha anomeric nucleic acids, or the like), as well as unmodified forms of the polynucleotide or oligonucleotide.

[0046] A “promoter” means a nucleic acid sequence sufficient to direct transcription of an operably linked nucleic acid molecule. A promoter can be used together with other transcription control elements (for example, enhancers) that are sufficient to render promoter-dependent gene expression controllable in a cell type-specific, tissue-specific, or temporal-specific manner, or that are inducible by external signals or agents; such elements, may be within the 3′ region of a gene or within an intron. Desirably, a promoter is operably linked to a nucleic acid sequence, for example, a cDNA or a gene sequence, or an effector RNA coding sequence, in such a way as to enable expression of the nucleic acid sequence, or a promoter is provided in an expression cassette into which a selected nucleic acid sequence to be transcribed can be conveniently inserted.

[0047] The term “selectable marker” means a polynucleotide segment that allows one to select for or against a molecule or a cell that contains it, often under particular conditions. These markers can encode an activity, such as, but not limited to, production of RNA, peptide, or protein, or can provide a binding site for RNA, peptides, proteins, inorganic and organic compounds or compositions. Examples of selectable markers include but are not limited to: (1) DNA segments that encode products which provide resistance against otherwise toxic compounds (e.g., antibiotics); (2) DNA segments that encode products which are otherwise lacking in the recipient cell (e.g., tRNA genes, auxotrophic markers); (3) DNA segments that encode products which suppress the activity of a gene product; (4) DNA segments that encode products which can be readily identified (e.g., phenotypic markers such as beta-galactosidase, green fluorescent protein (GFP), and cell surface proteins); (5) DNA segments that bind products which are otherwise detrimental to cell survival and/or function; (6) DNA segments that otherwise inhibit the activity of any of the DNA segments described in Nos. 1-5 above (e.g., antisense oligonucleotides); (7) DNA segments that bind products that modify a substrate (e.g. restriction endonucleases); (8) DNA segments that can be used to isolate a desired molecule (e.g. specific protein binding sites); (9) DNA segments that encode a specific nucleotide sequence which can be otherwise non-functional (e.g., for PCR amplification of subpopulations of molecules); and/or (10) DNA segments, which when absent, directly or indirectly confer sensitivity to particular compounds.

[0048] Sequence identity can be determined by aligning sequences using algorithms, such as BESTFIT, FASTA, and TFASTA in the Wisconsin Genetics Software Package Release 7.0, Genetics Computer Group, 575 Science Dr., Madison, Wis.), using default gap parameters, or by inspection, and the best alignment (i.e., resulting in the highest percentage of sequence similarity over a comparison window). Percentage of sequence identity is calculated by comparing two optimally aligned sequences over a window of comparison, determining the number of positions at which the identical residues occurs in both sequences to yield the number of matched positions, dividing the number of matched positions by the total number of matched and mismatched positions not counting gaps in the window of comparison (i.e., the window size), and multiplying the result by 100 to yield the percentage of sequence identity. Unless otherwise indicated the window of comparison between two sequences is defined by the entire length of the shorter of the two sequences.

[0049] A Sleeping Beauty transposase is a Mariner type transposase with a sequence at least 90, 95, 99 or 100% identical to SEQ ID NO: 28 that is capable of transposing a transposon with left end sequence SEQ ID NO: 24 and right end sequence SEQ ID NO: 25 into the genome of a host cell. A Sleeping Beauty transposon is comprises a left ITR that is at least 90, 95, 99 or 100% identical to SEQ ID NO: 26 and a right ITR that is 90% identical to SEQ ID NO: 27. A Sleeping Beauty transposon may comprise a transposon end (including the ITR) that is at least 90, 95, 99 or 100% identical to SEQ ID NO: 24 and a right transposon end (including the ITR) that is at least 90, 95, 99 or 100% identical to SEQ ID NO: 25, and that can be transposed into the genome of a host cell by the Sleeping Beauty transposase with SEQ ID NO: 28.

[0050] A “target nucleic acid” is a nucleic acid into which a transposon is to be inserted. Such a target can be part of a chromosome, episome or vector.

[0051] An “integration target sequence” or “target sequence” or “target site” for a transposase is a site or sequence in a target DNA molecule into which a transposon can be inserted by a transposase. The piggyBac transposase from Trichoplusia ni inserts its transposon predominantly into the target sequence 5′-TTAA-3′. PiggyBac-like transposases transpose their transposons using a cut-and-paste mechanism, which results in duplication of their 4 base pair target sequence on insertion into a DNA molecule. The target sequence is thus found on each side of an integrated piggyBac-like transposon.

[0052] The term “translation” refers to the process by which a polypeptide is synthesized by a ribosome ‘reading’ the sequence of a polynucleotide.

[0053] A ‘transposase’ is a polypeptide that catalyzes the excision of a corresponding transposon from a donor polynucleotide, for example a vector, and (providing the transposase is not integration-deficient) the subsequent integration of the transposon into a target nucleic acid. A transposase may be a piggyBac-like transposase or a mariner transposase such as Sleeping Beauty.

[0054] The term “transposition” is used herein to mean the action of a transposase in excising a transposon from one polynucleotide and then integrating it, either into a different site in the same polynucleotide, or into a second polynucleotide.

[0055] The term “transposon” means a polynucleotide that can be excised from a first polynucleotide, for instance, a vector, and be integrated into a second position in the same polynucleotide, or into a second polynucleotide, for instance, the genomic or extrachromosomal DNA of a cell, by the action of a corresponding trans-acting transposase. A transposon comprises a first transposon end and a second transposon end, which are polynucleotide sequences recognized by and transposed by a transposase. A transposon usually further comprises a first polynucleotide sequence between the two transposon ends, such that the first polynucleotide sequence is transposed along with the two transposon ends by the action of the transposase. Natural transposons frequently comprise DNA encoding a transposase that acts on the transposon. Transposons of the present invention are “synthetic transposons” comprising a heterologous polynucleotide sequence which is transposable by virtue of its juxtaposition between two transposon ends. A transposon may be a piggyBac-like transposon or a mariner transposon such as Sleeping Beauty.

[0056] The term “transposon end” means the cis-acting nucleotide sequences that are sufficient for recognition by and transposition by a corresponding transposase. Transposon ends of piggyBac-like transposons comprise perfect or imperfect repeats such that the respective repeats in the two transposon ends are reverse complements of each other. These are referred to as inverted terminal repeats (ITR) or terminal inverted repeats (TIR). A transposon end may or may not include additional sequence proximal to the ITR that promotes or augments transposition.

[0057] The term “vector” or “DNA vector” or “gene transfer vector” refers to a polynucleotide that is used to perform a “carrying” function for another polynucleotide. For example, vectors are often used to allow a polynucleotide to be propagated within a living cell, or to allow a polynucleotide to be packaged for delivery into a cell, or to allow a polynucleotide to be integrated into the genomic DNA of a cell. A vector may further comprise additional functional elements, for example it may comprise a transposon.

[0058] An immune cell can refer to any cell of an immune system including cells of adaptive and innate immune systems and including cells of myeloid or lymphoid origin. Examples of immune cells include leucocytes, lymphocytes, macrophages, neutrophils, dendritic cells, lymphoid cells, mast cells eosinophils basophils and natural killer cells. Lymphocytes include B and T lymphocytes. T lymphocytes include killer T cells, helper T cells and gamma delta T cells. Immune cells can be primary cells isolated from a subject or can be the result of further culturing including in the form of a cell line. Immune cells can be the subject of genetic engineering in addition to that described herein, e.g., expression of a CAR-T receptor.

[0059] The disclosure refers to several proteins for which it provides an exemplary SEQ ID NO. representing the wildtype human sequence of the protein. Unless otherwise apparent from the context reference to a protein should be understood as including the exemplified SEQ ID NO. as well as allelic, species and induced variants thereof having at least 90, 95, or 99% identity thereto. Examples of allelic and species variants can be found in the SwissProt and other databases. Any such sequences for the protein can be modified to include one or more of the activating mutations described herein to confer enhanced survival of an immune cell expressing the protein as further described herein.

[0060] Mutations are sometimes referred to in the form XnY, wherein X is a wildtype amino acid, n is an amino acid position of X in a wildtype sequence, and Y is a replacement amino acid. If the mutation occurs in a sequence having a different number of amino acids than the wildtype sequence, it is present at the position in the sequence aligned with position n in the wildtype sequence when the respective sequences are maximally aligned.

[0061] If a nucleic acid is said to encode an activating mutant of a specified protein what is meant is the nucleic acid encodes the protein including the activating mutation.

[0062] An apoptosis inhibitor is a substance that interferes with the process of programmed cell death (apoptosis). Apoptosis is a highly regulated process in which cell death is induced by activation of intracellular caspase proteases. Apoptosis inhibitors include proteins whose natural function is to oppose apoptosis, and proteins whose natural function is to participate in apoptosis, but which comprise mutations that interfere with apoptosis.

[0063] An apoptosis assay detects and quantifies the cellular events associated with programmed cell death, including caspase activation, cell surface exposure of phosphatidylserine (PS) and DNA fragmentation. The initiator and effector caspases are particularly good targets for detecting apoptosis in cells. Caspase activity assays either use peptide substrates, which are cleaved by caspases, or similar substrates that bind to activated caspases in live cells (McStay et al., 2014 Cold Spring Harbor Protocols, Measuring Apoptosis: Caspase Inhibitors and Activity assays; Niles et al, 2008, Methods Mol Biol., 414:137-50). An exemplary assay to measure apoptosis inhibition is the bioluminescence assay that uses luciferase described herein in paragraph [00174]. A number of caspase assay kits are commercially available that use either fluorescence or luminescence readouts, for example the caspase-Glo® assays from Promega use the luminogenic caspase-8 tetrapeptide substrate (Z-LETD-aminoluciferin), the caspase-9 tetrapeptide substrate (Z-LEHD-aminoluciferin), the caspase-3/7 substrate (Z-DEVD-aminoluciferin), the caspase-6 substrate (Z-VEID-aminoluciferin), or the caspase-2 substrate (Z-VDVAD-aminoluciferin) and a stable luciferase in proprietary buffers. In the absence of active caspase or inhibition of caspase, the caspase substrates do not act as substrates for luciferase and thus produce no light. On cleavage of the substrates by the respective caspase, aminoluciferin is liberated and can contribute to the generation of light in a luminescence reaction. The resulting luminescent signal is directly proportional to the amount of caspase activity present in the sample. An example of a caspase activity assay kit that uses a fluorescence substrate N-AcetylAsp-Glu-Val-Asp-7-amino-4-methylcoumarin or Ac-DEVDAMC for caspase-3 is the Caspase-3 Activity assay kit from Cell Signaling Technology. Activated caspase-3 cleaves this substrate between DEVD and AMC, generating highly fluorescent AMC that can be detected using a fluorescence reader with excitation at 380 nm and emission between 420-460 nm. Cleavage of the substrate only occurs in lysates of apoptotic cells; therefore, the amount of AMC produced is proportional to the number of apoptotic cells in the sample.

### Genetic Elements Useful for Expression in Immune Cells

### Transposon Elements

[0064] The consistency of expression of a gene from a heterologous polynucleotide in an immune cell can be improved if the heterologous polynucleotide is integrated into the genome of the host cell. Integration of a polynucleotide into the genome of a host cell also generally makes it stably heritable, by subjecting it to the same mechanisms that ensure the replication and division of genomic DNA. Such stable heritability is desirable for achieving good and consistent expression over long growth periods. For stable modification of immune cells, particularly for therapeutic applications, the stability of the modification and consistency of expression levels are important.

[0065] Heterologous polynucleotides may be more efficiently integrated into a target genome if they are part of a transposon, for example so that they may be integrated by a transposase. A particular benefit of a transposon is that the entire polynucleotide between the transposon ITRs is integrated. This is in contrast with random integration, where a polynucleotide introduced into a eukaryotic cell is often fragmented at random in the cell, and only parts of the polynucleotide become incorporated into the target genome, usually at a low frequency. Heterologous polynucleotides incorporated into piggyBac-like transposons may be integrated into immune cells, as well as hepatocytes, neural cells, muscle cells, blood cells, embryonic stem cells, somatic stem cells, hematopoietic cells, embryos, zygotes and sperm cells (some of which are open to be manipulated in an in vitro setting). Preferred cells can also be pluripotent cells (cells whose descendants can differentiate into several restricted cell types, such as hematopoietic stem cells or other stem cells) or totipotent cells (i.e., a cell whose descendants can become any cell type in an organism, e.g., embryonic stem cells).

[0066] Preferred gene transfer systems comprise a transposon in combination with a corresponding transposase protein that transposases the transposon, or a nucleic acid that encodes the corresponding transposase protein and is expressible in the target cell. piggyBac-like transposons are advantageous as gene transfer systems for the applications described herein compared with lentiviral vectors for several reasons. Lentiviruses are not packaged efficiently if they exceed a certain size, and a significant amount of their DNA is already occupied with sequences required for viral synthesis, assembly and packaging. Genes integrated through lentiviral vectors can show highly variable expression due to promoter silencing (Antoniou et al., 2013. Hum Gene Ther 24, 363-374. “Optimizing retroviral gene expression for effective therapies”): silencing can be reduced either by increasing copy number or by incorporating insulators into the integrating polynucleotide (Emery, 2011. Hum Gene Ther 22, 761-774. “The use of chromatin insulators to improve the expression and safety of integrating gene transfer vectors”). Including insulators in lentiviral constructs can be challenging because of size limitations and because of effects of including these sequences on viral packaging and titer. In contrast the efficient integration of a piggyBac-like transposon into a target genome by its corresponding transposase is unperturbed by increasing the transposon size. It is therefore possible to include multiple genes for modification of the properties of an immune cell into a single transposon, together with flanking insulators, without compromising the ability of the corresponding transposase to integrate the transposon into the genome of an immune cell. Safety is also of significant concern when modifying the genome of a cell that is to be placed into a human. When making modifications of immune cells such as T-cells to enhance their ability to kill tumor cells and to improve their ability to survive and proliferate, it is therefore useful to be able to also incorporate into the genome of the cell a gene that provides a means of killing the modified immune cell. Examples of such “kill switches” include expression of an antigen that is efficiently recognized by an existing therapeutic agent (for example a surface-expressed antigen such as CD20 that is normally found exclusively on B-cells and is recognized and treated by the drug rituximab or CD19 that is normally found exclusively on B-cells and is recognized and treated by the drug blinotumomab) and an inducible caspase 9 suicide switch (Straathof et. al., 2005. Blood 105, 4247-4254. “An inducible caspase 9 safety switch for T-cell therapy”). For kill switches to be useful, they must be present in the genome of every modified cell. An example of an attempt to do this in a lentiviral vector carrying a gene for a chimeric antigen receptor plus sequences encoding a CD19 selectable marker and an inducible caspase 9 as a kill switch is described by Budde et al (PLoS One 8(12): e82742. doi: 10.1371/journal.pone.0082742. eCollection 2013. “Combining a CD20 chimeric antigen receptor and an inducible caspase 9 suicide switch to improve the efficacy and safety of T cell adoptive immunotherapy for lymphoma.”). In order to combine kill switches with the chimeric antigen receptor gene, the authors had to use viral CHYSL/2A sequences to separate the polypeptide comprising the chimeric antigen receptor from the inducible caspase 9, and they had to truncate the CD19 gene. This cargo plus the regulatory elements for expression occupied essentially the entire capacity of the lentiviral vector, leaving no additional space for the addition of insulators or for other genes such as those for enhancing the survival or proliferation or function of the T-cell. Gene transfer systems comprising a piggyBac-like transposon and its corresponding transposase are thus advantageous for integrating genes including genes encoding chimeric antigen receptors into the genomes of immune cells including T-cells.

[0067] A Xenopus transposon is an advantageous piggyBac-like transposon for modifying the genome of an immune cell and comprises an ITR with the with sequence given by SEQ ID NO: 6, a heterologous polynucleotide to be transposed and a second ITR with sequence given by SEQ ID NO: 7. The transposon may further be flanked by a copy of the tetranucleotide 5′-TTAA-3′ on each side, immediately adjacent to the ITRs and distal to the heterologous polynucleotide. The transposon may further comprise a sequence immediately adjacent to the ITR and proximal to the heterologous polynucleotide that is at least 95% identical to SEQ ID NO: 1 or 2 on one side of the heterologous polynucleotide, preferably the left side, and a sequence immediately adjacent to the ITR and proximal to the heterologous polynucleotide that is at least 95% identical to SEQ ID NO: 4 or 5 on the other side of the heterologous polynucleotide, preferably the right side. This transposon may be transposed by a transposase comprising a sequence at least 90% identical to the sequence given by SEQ ID 31 or 32, for example any of SEQ ID NOs: 33-63. Preferably the transposase is a hyperactive variant of a naturally occurring transposase. Preferably the hyperactive variant transposase comprises one of the following amino acid changes, relative to the sequence of SEQ ID NO: 31: Y6L, Y6H, Y6V, Y61, Y6C, Y6G, Y6A, Y6S, Y6F, Y6R, Y6P, Y6D, Y6N, S7G, S7V, S7D, E9W, E9D, E9E, M16E, M16N, M16D, M16S, M16Q, M16T, M16A, M16L, M16H, M16F, M161, S18C, 518Y, S18M, S18L, S18Q, S18G, S18P, S18A, S18W, S18H, S18K, S18I, S18V, S19C, S19V, S19L, S19F, S19K, S19E, S19D, S19G, S19N, S19A, S19M, S19P, 519Y, S19R, S19T, S19Q, 520G, 520M, S20L, 520V, S20H, S20W, 520A, 520C, 520Q, 520D, 520F, S20N, S20R, E21N, E21W, E21G, E21Q, E21L, E21D, E21A, E21P, E21T, E21S, E21Y, E21V, E21F, E21M, E22C, E22H, E22R, E22L, E22K, E22S, E22G, E22M, E22V, E22Q, E22A, E22Y, E22W, E22D, E22T, F23Q, F23A, F23D, F23W, F23K, F23T, F23V, F23M, F23N, F23P, F23H, F23E, F23C, F23R, F23Y, S24L, S24W, S24H, S24V, S24P, S241, S24F, S24K, S24Y, S24D, S24C, S24N, S24G, S24A, S26F, S26H, S26V, S26Q, S26Y, S26W, S28K, S28Y, S28C, S28M, S28L, S28H, S28T, S28Q, V31L, V31T, V311, V31Q, V31K, A34L, A34E, L67A, L67T, L67M, L67V, L67C, L67H, L67E, L67Y, G73H, G73N, G73K, G73F, G73V, G73D, G73S, G73W, G73L, A76L, A76R, A76E, A761, A76V, D77N, D77Q, D77Y, D77L, D77T, P88A, P88E, P88N, P88H, P88D, P88L, N91D, N91R, N91A, N91L, N91H, N91V, Y1411, Y141M, Y141Q, Y141S, Y141E, Y141W, Y141V, Y141F, Y141A, Y141C, Y141K, Y141L, Y141H, Y141R, N145C, N145M, N145A, N145Q, N145I, N145F, N145G, N145D, N145E, N145V, N145H, N145W, N145Y, N145L, N145R, N145S, P146V, P146T, P146W, P146C, P146Q, P146L, P146Y, P146K, P146N, P146F, P146E, P148M, P148R, P148V, P148F, P148T, P148C, P148Q, P148H, Y150W, Y150A, Y150F, Y150H, Y150S, Y150V, Y150C, Y150M, Y150N, Y150D, Y150E, Y150Q, Y150K, H157Y, H157F, H157T, H157S, H157W, A162L, A162V, A162C, A162K, A162T, A162G, A162M, A162S, A1621, A162Y, A162Q, A179T, A179K, A179S, A179V, A179R, L182V, L1821, L182Q, L182T, L182W, L182R, L182S, T189C, T189N, T189L, T189K, T189Q, T189V, T189A, T189W, T189Y, T189G, T189F, T189S, T189H, L192V, L192C, L192H, L192M, L1921, S193P, S193T, S193R, S193K, S193G, S193D, S193N, S193F, S193H, S193Q, S193Y, V196L, V196S, V196W, V196A, V196F, V196M, V1961, S198G, S198R, S198A, S198K, T200C, T200I, T200M, T200L, T200N, T200W, T200V, T200Q, T200Y, T200H, T200R, S202A, S202P, L210H, L210A, F212Y, F212N, F212M, F212C, F212A, N218V, N218R, N218T, N218C, N218G, N218I, N218P, N218D, N218E, A248S, A248L, A248H, A248C, A248N, A2481, A248Q, A248Y, A248M, A248D, L263V, L263A, L263M, L263R, L263D, Q270V, Q270K, Q270A, Q270C, Q270P, Q270L, Q2701, Q270E, Q270G, Q270Y, Q270N, Q270T, Q270W, Q270H, S294R, S294N, S294G, S294T, S294C, T297C, T297P, T297V, T297M, T297L, T297D, E304D, E304H, E304S, E304Q, E304C, S308R, S308G, L310R, L3101, L310V, L333M, L333W, L333F, Q336Y, Q336N, Q336M, Q336A, Q336T, Q336L, Q3361, Q336G, Q336F, Q336E, Q336V, Q336C, Q336H, A354V, A354W, A354D, A354C, A354R, A354E, A354K, A354H, A354G, C357Q, C357H, C357W, C357N, C3571, C357V, C357M, C357R, C357F, C357D, L358A, L358F, L358E, L358R, L358Q, L358V, L358H, L358C, L358M, L358Y, L358K, L358N, L3581, D359N, D359A, D359L, D359H, D359R, D359S, D359Q, D359E, D359M, L377V, L3771, V423N, V423P, V423T, V423F, V423H, V423C, V423S, V423G, V423A, V423R, V423L, P426L, P426K, P426Y, P426F, P426T, P426W, P426V, P426C, P426S, P426Q, P426H, P426N, K428R, K428Q, K428N, K428T, K428F, S434A, S434T, S438Q, S438A, S438M, T447S, T447A, T447C, T447Q, T447N, T447G, L450M, L450V, L450A, L450I, L450E, A462M, A462T, A462Y, A462F, A462K, A462R, A462Q, A462H, A462E, A462N, A462C, V467T, V467C, V467A, V467K, I469V, I469N, I472V, I472L, I472W, I472M, I472F, L476I, L476V, L476N, L476F, L476M, L476C, L476Q, P488E, P488H, P488K, P488Q, P488F, P488M, P488L, P488N, P488D, Q498V, Q498L, Q498G, Q498H, Q498T, Q498C, Q498E, Q498M, L5021, L502M, L502V, L502G, L502F, E517M, E517V, E517A, E517K, E517L, E517G, E517S, E517I, P520W, P520R, P520M, P520F, P520Q, P520V, P520G, P520D, P520K, P520Y, P520E, P520L, P520T, S521A, S521H, S521C, S521V, S521W, S521T, S521K, S521F, S521G, N523W, N523A, N523G, N523S, N523P, N523M, N523Q, N523L, N523K, N523D, N523H, N523F, N523C, I533M, I533V, I533T, I533S, I533F, I533G, 1533E, D534E, D534Q, D534L, D534R, D534V, D534C, D534M, D534N, D534A, D534G, D534F, D534T, D534H, D534K, D534S, F576L, F576K, F576V, F576D, F576W, F576M, F576C, F576R, F576Q, F576A, F576Y, F576N, F576G, F576I, F576E, K577L, K577G, K577D, K577R, K577H, K577Y, K577I, K577E, K577V, K577N, I582V, I582K, I582R, I582M, I582G, I582N, 1582E, I582A, I582Q, Y583L, Y583C, Y583F, Y583D, Y583Q, L587F, L587D, L587R, L587I, L587P, L587N, L587E, L587S, L587Y, L587M, L587Q, L587G, L587W, L587K or L587T.

[0068] A Bombyx transposon is an advantageous piggyBac-like transposon for modifying the genome of an immune cell and comprises an ITR with the sequence of SEQ ID NO: 14, a heterologous polynucleotide to be transposed and a second ITR with the sequence of SEQ ID NO: 15. The transposon may further be flanked by a copy of the tetranucleotide 5′-TTAA-3′ on each side, immediately adjacent to the ITRs and distal to the heterologous polynucleotide. The transposon may further comprise a sequence immediately adjacent to the ITR and proximal to the heterologous polynucleotide that is at least 95% identical to SEQ ID NO: 12 on one side of the heterologous polynucleotide, preferably the left side, and a sequence immediately adjacent to the ITR and proximal to the heterologous polynucleotide that is at least 95% identical to SEQ ID NO: 13 on the other side of the heterologous polynucleotide, preferably the right side. This transposon may be transposed by a transposase comprising a sequence at least 90% identical to SEQ ID NO: 64, for example any of SEQ ID NOs: 65-86. Preferably the transposase is a hyperactive variant of a naturally occurring transposase. Preferably the hyperactive variant transposase comprises one of the following amino acid changes, relative to the sequence of SEQ ID NO: BM-Tpase1: Q85E, Q85M, Q85K, Q85H, Q85N, Q85T, Q85F, Q85L, Q92E, Q92A, Q92P, Q92N, Q92I, Q92Y, Q92H, Q92F, Q92R, Q92D, Q92M, Q92W, Q92C, Q92G, Q92L, Q92V, Q92T, V93P, V93K, V93M, V93F, V93W, V93L, V93A, V93I, V93Q, P96A, P96T, P96M, P96R, P96G, P96V, P96E, P96Q, P96C, F97Q, F97K, F97H, F97T, F97C, F97W, F97V, F97E, F97P, F97D, F97A, F97R, F97G, F97N, F97Y, H165E, H165G, H165Q, H165T, H165M, H165V, H165L, H165C, H165N, H165D, H165K, H165W, H165A, E178S, E178H, E178Y, E178F, E178C, E178A, E178Q, E178G, E178V, E178D, E178L, E178P, E178W, C189D, C189Y, C1891, C189W, C189T, C189K, C189M, C189F, C189P, C189Q, C189V, A196G, L200I , L200F, L200C, L200M, L200Y, A201Q, A201L, A201M, L203V, L203D, L203G, L203E, L203C, L203T, L203M, L203A, L203Y, N207G, N207A, L211G, L211M, L211C, L211T, L211V, L211A, W215Y, T217V, T217A, T217I, T217P, T217C, T217Q, T217M, T217F, T217D, T217K, G219S, G219A, G219C, G219H, G219Q, Q235C, Q235N, Q235H, Q235G, Q235W, Q235Y, Q235A, Q235T, Q235E, Q235M, Q235F, Q238C, Q238M, Q238H, Q238V, Q238L, Q238T, Q2381, R242Q, K2461, K253V, M258V, F261L, S263K, C271S, N303C, N303R, N303G, N303A, N303D, N303S, N303H, N303E, N303R, N303K, N303L, N303Q, 1312F, 1312C, 1312A, 1312L, 1312T, 1312V, 1312G, 1312M, F321H, F321R, F321N, F321Y, F321W, F321D, F321G, F321E, F321M, F321K, F321A, F321Q, V3231, V323L, V323T, V323M, V323A, V324N, V324A, V324C, V3241, V324L, V324T, V324K, V324Y, V324H, V324F, V324S, V324Q, V324M, V324G, A330K, A330V, A330P, A330S, A330C, A330T, A330L, Q333P, Q333T, Q333M, Q333H, Q333S, P337W, P337E, P337H, P3371, P337A, P337M, P337N, P337D, P337K, P337Q, P337G, P337S, P337C, P337L, P337V, F368Y, L373C, L373V, L3731, L373S, L373T, V3891, V389M, V389T, V389L, V389A, R394H, R394K, R394T, R394P, R394M, R394A, Q395P, Q395F, Q395E, Q395C, Q395V, Q395A, Q395H, Q395S, Q395Y, S399N, S399E, S399K, S399H, S399D, S399Y, S399G, S399Q, S399R, S399T, S399A, S399V, S399M, R402Y, R402K, R402D, R402F, R402G, R402N, R402E, R402M, R402S, R402Q, R402T, R402C, R402L, R402V, T403W, T403A, T403V, T403F, T403L, T403Y, T403N, T403G, T403C, T4031, T403S, T403M, T403Q, T403K, T403E, D404I, D404S, D404E, D404N, D404H, D404C, D404M, D404G, D404A, D404Q, D404L, D404P, D404V, D404W, D404F, N408F, N408I, N408A, N408E, N408M, N408S, N408D, N408Y, N408H, N408C, N408Q, N408V, N408W, N408L, N408P, N408K, S409H, S409Y, S409N, S409I, S409D, S409F, S409T, S409C, S409Q, N441F, N441R, N441M, N441G, N441C, N441D, N441L, N441A, N441V, N441W, G448W, G448Y, G448H, G448C, G448T, G448V, G448N, G448Q, E449A, E449P, E449T, E449L, E449H, E449G, E449C, E449I, V469T, V469A, V469H, V469C, V469L, L472K, L472Q, L472M, C473G, C473Q, C473T, C473I, C473M, R484H, R484K, T507R, T507D, T507S, T507G, T507K, T507I, T507M, T507E, T507C, T507L, T507V, G523Q, G523T, G523A, G523M, G523S, G523C, G523I, G523L, I527M, I527V, Y528N, Y528W, Y528M, Y528Q, Y528K, Y528V, Y528I, Y528G, Y528D, Y528A, Y528E, Y528R, Y543C, Y543W, Y543I, Y543M, Y543Q, Y543A, Y543R, Y543H, E549K, E549C, E549I, E549Q, E549A, E549H, E549C, E549M, E549S, E549F, E549L, K550R, K550M, K550Q, S556G, S556V, S556I, P557W, P557T, P557S, P557A, P557Q, P557K, P557D, P557G, P557N, P557L, P557V, H559K, H559S, H559C, H559I, H559W, V560F, V560P, V560I, V560H, V560Y, V560K, N561P, N561Q, N561G, N561A, V562Y, V562I, V562S, V562M, V567I, V567H, V567N, S583M, E601V, E601F, E601Q, E601W, E605R, E605W, E605K, E605M, E605P, E605Y, E605C, E605H, E605A, E605Q, E605S, E605V, E6051, E605G, D607V, D607Y, D607C, D607N, D607W, D607T, D607A, D607H, D607Q, D607E, D607L, D607K, D607G, S609R, S609W, S609H, S609V, S609Q, S609G, S609T, S609K, S609N, S609Y, L610T, L610I, L610K, L610G, L610A, L610W, L610D, L610Q, L610S, L610F or L610N.

[0069] A piggyBat transposon is an advantageous piggyBac-like transposon for modifying the genome of an immune cell and comprises an ITR with the sequence of SEQ ID NO: 20, a heterologous polynucleotide to be transposed and a second ITR with the sequence of SEQ ID NO: 21. The transposon may further be flanked by a copy of the tetranucleotide 5′-TTAA-3′ on each side, immediately adjacent to the ITRs and distal to the heterologous polynucleotide. The transposon may further comprise a sequence immediately adjacent to the ITR and proximal to the heterologous polynucleotide that is at least 95% identical to SEQ ID NO: 22 on one side of the heterologous polynucleotide, preferably the left side, and a sequence immediately adjacent to the ITR and proximal to the heterologous polynucleotide that is at least 95% identical to SEQ ID NO: 23 on the other side of the heterologous polynucleotide, preferably the right side. This transposon may be transposed by a transposase comprising a sequence at least 90% identical to SEQ ID NO: 29. Preferably the transposase is a hyperactive variant of a naturally occurring transposase. Preferably the hyperactive variant transposase comprises one of the following amino acid changes, relative to the sequence of SEQ ID NO: 29: A14V, D475G, P491Q, A561T, T546T, T300A, T294A, A520T, C239S, S5P, S8, S54N, D9N, D9G. 1345 V, M481V, E11G, K130T G9G, R427H, S8P, S36G D1OG, S36G.

[0070] An advantageous piggyBac-like transposon for modifying the genome of an immune cell comprises an ITR with the sequence of SEQ ID NO: 16, a heterologous polynucleotide to be transposed and a second ITR with the sequence of SEQ ID NO: 17. The transposon may further be flanked by a copy of the tetranucleotide 5′-TTAA-3′ on each side, immediately adjacent to the ITRs and distal to the heterologous polynucleotide. The transposon may further comprise a sequence immediately adjacent to the ITR and proximal to the heterologous polynucleotide that is at least 95% identical to SEQ ID NO: 18 on one side of the heterologous polynucleotide, preferably the left side, and a sequence immediately adjacent to the ITR and proximal to the heterologous polynucleotide that is at least 95% identical to SEQ ID NO: 19 on the other side of the heterologous polynucleotide preferably the right side. This transposon may be transposed by a transposase comprising a sequence at least 90% identical to SEQ ID NO: 30. Preferably the transposase is a hyperactive variant of a naturally occurring transposase. Preferably the hyperactive variant transposase comprises one of the following amino acid changes, relative to the sequence of SEQ ID NO: 30: G2C, Q40R, I30V, G1655, T43A, S61R, S103P, S103T, M194V, R281G, M282V, G316E, I426V, Q497L, N505D, Q573L, 5509G, N570S, N538K, Q591P, Q591R, F594L, M194V, 130V, S103P, G1655, M282V, 5509G, N538K, N571S, C41T, A1424G, C1472A, G1681A, T150C, A351G, A279G, T1638C, A898G, A880G, G1558A, A687G, G715A, T13C, C23T, G161A, G25A, T1050C, A1356G, A26G, A1033G, A1441G, A32G, A389C, A32G, A389C, A32G, T1572A, G456A, T1641C, Tl 155C, G1280A, T22C, A106G, A29G, C137T, A14V, D475G, P491Q, A561T, T546T, T300A, T294A, A520T, G239S, S5P, S8F, S54N, D9N, D9G, 1345 V, M481V, E11G, K130T, G9G, R427H, S8P, S36G, D10G, S36G, A51T, C153A, C277T, G201A, G202A, T236A, A103T, A104C, T140C, G138T, T118A, C74T, A179C, S3N, I30V, A465, A46T, I82W, S103P, R119P, C125A, C125L, G1655, Y177K, Y177H, F180L, F1801, F180V, M185L, A187G, F200W, V207P, V209F, M226F, L235R, V240K, F241L, P243K, N258S, M282Q, L296W, L296Y, L296F, M298V, M298A, M298L, P311V, P311I, R315K, T319G, Y327R, Y328V, C340G, C340L, D421H, V436I, M456Y, L470F, S486K, M5031, M503L, V552K, A570T, Q591P, Q591R, R65A, R65E, R95A, R95E, R97A, R97E, R135A, R135E, R161A, R161E, R192A, R192E, R208A, R208E, K176A, K176E, K195A, K195E, S171E, M14V, D270N, 130V, G1655, M282L, M2821, M282V or M282A.

[0071] An advantageous Mariner transposon for modifying the genome of an immune cell is a Sleeping Beauty transposon which comprises an ITR with the sequence of SEQ ID NO: 26, a heterologous polynucleotide and a second ITR with the sequence of SEQ ID NO: 27. The ITR may be part of a longer transposon end sequence, for example the transposon may comprise a left end with a sequence at least 95% identical to SEQ ID NO: 24 and a right end with sequence at least 95% identical to SEQ ID NO: 25. This transposon may be transposed by a transposase comprising a sequence at least 90% identical to SEQ ID NO: 28, including hyperactive variants thereof.

[0072] An advantageous hAT transposon for modifying the genome of an immune cell is a TcBuster transposon which comprises an ITR with the sequence of SEQ ID NO: 399, a heterologous polynucleotide and a second ITR with the sequence of SEQ ID NO: 400. The ITR may be part of a longer transposon end sequence, for example the transposon may comprise a left end with a sequence at least 95% identical to SEQ ID NO: 397 and a right end with sequence at least 95% identical to SEQ ID NO: 398. This transposon may be transposed by a transposase comprising a sequence at least 90% identical to SEQ ID NO: 401, including hyperactive variants thereof.

[0073] A transposase protein can be introduced into a cell as a protein or as a nucleic acid encoding the transposase, for example as a ribonucleic acid, including mRNA or any polynucleotide recognized by the translational machinery of a cell; as DNA, e.g. as extrachromosomal DNA including episomal DNA; as plasmid DNA, or as viral nucleic acid. Furthermore, the nucleic acid encoding the transposase protein can be transfected into a cell as a nucleic acid vector such as a plasmid, or as a gene expression vector, including a viral vector. The nucleic acid can be circular or linear. DNA encoding the transposase protein can be stably inserted into the genome of the cell or into a vector for constitutive or inducible expression. Where the transposase protein is transfected into the cell or inserted into the vector as DNA, the transposase encoding sequence is preferably operably linked to a heterologous promoter. There are a variety of promoters that could be used including constitutive promoters, tissue-specific promoters, inducible promoters, and the like. All DNA or RNA sequences encoding piggyBac-like transposase proteins are expressly contemplated. Alternatively, the transposase may be introduced into the cell directly as protein, for example using cell-penetrating peptides (e.g. as described in Ramsey and Flynn (2015) Pharmacol. Ther. 154: 78-86 “Cell-penetrating peptides transport therapeutics into cells”); using small molecules including salt plus propanebetaine (e.g. as described in Astolfo et al (2015) Cell 161: 674-690); or electroporation (e.g. as described in Morgan and Day (1995) Methods in Molecular Biology 48: 63-71 “The introduction of proteins into mammalian cells by electroporation”).

### Gene Transfer Systems

[0074] Gene transfer systems comprise a polynucleotide to be transferred to a host cell. The gene transfer system may comprise any of the transposons or transposases described herein, or it may comprise one or more polynucleotides that have other features that facilitate efficient gene transfer without the need for a transposase or transposon.

[0075] When there are multiple components of a gene transfer system, for example the one or more polynucleotides comprising genes for expression in the target cell and optionally comprising transposon ends, and a transposase (which may be provided either as a protein or encoded by a nucleic acid), these components can be transfected into a cell at the same time, or at different times. For example, a transposase protein or its encoding nucleic acid may be transfected into a cell prior to, simultaneously with or subsequently to transfection of a corresponding transposon. Additionally, administration of either component of the gene transfer system may occur repeatedly, for example, by administering at least two doses of this component.

[0076] Transposase proteins may be encoded by polynucleotides including RNA or DNA. If the transposase is provided as a gene encoded in DNA, it should preferably be operably linked to a promoter that is active in the target cell. Preferable RNA molecules include those with appropriate substitutions to reduce toxicity effects on the cell, for example substitution of uridine with pseudouridine, and substitution of cytosine with 5-methyl cytosine. Similarly, the transposon or the nucleic acid encoding the transposase of this invention can be transfected into the cell as a linear fragment or as a circularized fragment, either as a plasmid or as recombinant viral DNA.

[0077] The components of the gene transfer system may be transfected into one or more cells by techniques such as particle bombardment, electroporation, microinjection, combining the components with lipid nanoparticles or lipid-containing vesicles, such as cationic lipid vesicles, DNA condensing reagents (example, calcium phosphate, polylysine or polyethyleneimine), or inserting the components (that is the nucleic acids) thereof into a viral vector and contacting the viral vector with the cell. Where a viral vector is used, the viral vector can include any of a variety of viral vectors known in the art including viral vectors selected from the group consisting of a retroviral vector, an adenovirus vector or an adeno-associated viral vector. The gene transfer system may be formulated in a suitable manner as known in the art, or as a pharmaceutical composition or kit.

### Promoter Elements

[0078] Gene transfer systems for expression of polypeptides in immune cells comprise a polynucleotide to be transferred to a host cell. The polynucleotide comprises a promoter that is active in the immune cell. Examples include promoters from constitutively expressed genes including mammalian glyceraldehyde 3-phosphate dehydrogenase (GAPDH) genes (for example sequences given by SEQ ID NOs: 97-107), mammalian phosphoglycerate kinase (PGK) genes (for example sequences given by SEQ ID NOs: 115-118), mammalian elongation factor 1a (EF1a) genes (for example sequences given by SEQ ID NOs: 94, 96 and 128-146), mammalian elongation factor 2 (EEF2) genes (for example sequences given by SEQ ID NOs: 1108, 109, 114 and 147-154) and ubiquitin genes (for example sequences given by SEQ ID NO: 95 or 125-127). These genes may be used with or without intron sequences including their natural intron sequences. Exemplary intron sequences are given as SEQ ID NOs: 155-159.

### Polyadenylation Elements

[0079] Gene transfer systems are useful for introducing genes for expression into eukaryotic cells. Many eukaryotic cells, including animal cells and higher plant cells, process the mRNA transcribed during gene expression. Protein-encoding genes are often polyadenylated, which stabilizes the mRNA within the cell. Polyadenylation signals may also help to terminate transcription. This can be particularly useful when more than one open reading frame is to be expressed from a polynucleotide, as it helps to reduce interference between two promoters. Polyadenylation sequences that are effective at terminating transcription from one promoter, thereby reducing interference with a second promoter located to the 3′ of the first promoter may be designed synthetically. Sequences SEQ ID NOs: 160-217 are all useful for initiating polyadenylation of a transcribed sequence, and in terminating transcription. Polyadenylation sequences SEQ ID NOs: 160-217 may be included in the polynucleotide of a gene transfer system for expression of genes in animal cells including vertebrate or invertebrate cells. Polyadenylation sequences SEQ ID NOs: 160-217 are useful for expressing genes in vertebrate cells including cells from mammals including rodents such as rats, mice, and hamsters; ungulates, such as cows, goats or sheep; swine; cells from human tissues and human stem cells. Polyadenylation sequences SEQ ID NOs: 160-217 are useful in different cell types including immune cells, lymphocytes, hepatocytes, neural cells, muscle cells, blood cells, embryonic stem cells, somatic stem cells, hematopoietic cells, embryos, zygotes and sperm cells (some of which are open to be manipulated in an in vitro setting). Polyadenylation sequences SEQ ID NOs: 160-217 are useful for expressing genes in pluripotent cells (cells whose descendants can differentiate into several restricted cell types, such as hematopoietic stem cells or other stem cells) or totipotent cells (i.e., a cell whose descendants can become any cell type in an organism, e.g., embryonic stem cells). Polyadenylation sequences SEQ ID NOs: 160-217 are useful for expressing genes in culture cells such as Chinese hamster ovary (CHO) cells or Human embryonic kidney (HEK293) cells.

[0080] Polyadenylation sequences SEQ ID NOs: 160-217 may be incorporated into a piggyBac-like transposon, or a Mariner transposon such as a Sleeping Beauty transposon, or an hAT transposon such as TcBuster, or in a non-transposon-based gene delivery polynucleotide. Polyadenylation sequences SEQ ID NOs: 160-217 are preferably incorporated into a polynucleotide to the 3′ end of an open reading frame to be expressed. Polyadenylation sequences SEQ ID NOs: 160-217 are useful when placed between two genes to be expressed, to terminate transcription from a first promoter and reduce promoter interference. An advantageous gene transfer system comprises a sequence at least 80% or 90% or 95% or 96% or 97% or 98% or 99% or 100% identical to any of SEQ ID NOs: 160-217.

### Insulator Elements

[0081] When a heterologous polynucleotide is integrated into the genome of an immune cell, it is often desirable to prevent genetic elements within the heterologous polynucleotide from influencing expression of endogenous immune cell genes. Similarly, it is often desirable to prevent genes within the heterologous polynucleotide from being influenced by elements in the immune cell genome, for example from being silenced by incorporation into heterochromatin. Insulator elements are known to have enhancer-blocking activity (helping to prevent the genes in the heterologous polynucleotide from influencing the expression of endogenous immune cell genes) and barrier activity (helping to prevent genes within the heterologous polynucleotide from being silenced by incorporation into heterochromatin). Enhancer-blocking activity can result from binding of transcriptional repressor CTCF protein. Barrier activity can result from binding of vertebrate barrier proteins such as USF1 and VEZF1. Useful insulator sequences comprise binding sites for CTCF, USF1 or VEZF1. An advantageous gene transfer system comprises a polynucleotide comprising an insulator sequence comprising a binding site for CTCF, USF1 or VEZF1. More preferably a gene transfer system comprises a polynucleotide comprising two insulator sequences, each comprising a binding site for CTCF, USF1 or VEZF1, wherein the two insulator sequences flank any promoters or enhancers within the heterologous polynucleotide. Advantageous examples of insulator sequences are given as SEQ ID NOs: 87-93.

[0082] If a heterologous polynucleotide comprising a promoter or enhancer is integrated into the genome of an immune cell without insulator sequences, there is a risk that either the promoter or enhancer elements within the heterologous polynucleotide will influence expression of endogenous immune cell genes (for example oncogenes), or that promoter or enhancer elements within the heterologous polynucleotide will be silenced by incorporation into heterochromatin. When a heterologous polynucleotide is integrated into a target genome following random fragmentation, some genetic elements are often lost, and others may be rearranged. There is thus a significant risk that, if the heterologous polynucleotide comprises insulator elements flanking enhancer and promoter elements, the insulator elements may be rearranged or lost, and the enhancer and promoter elements may be able to influence and be influenced by the genomic environment into which they integrate. It is therefore advantageous to use a transposon gene transfer system, wherein the entire sequence between the two transposon ITRs is integrated, without rearrangement, into the immune cell genome. Advantageous gene transfer systems for integration into immune cell genomes thus comprise a transposon in which elements are arranged in the following order: left transposon end; a first insulator sequence; sequences for expression within the immune cell; a second insulator sequence; right transposon end. The sequences for expression within the immune cell may include any number of regulatory sequences operably linked to any number of open reading frames. The transposon ends are preferably those of a piggyBac-like transposon or a Mariner transposon such as a Sleeping Beauty transposon, or a hAT transposon such as TcBuster transposon.

### Genetic Elements Useful for Enhancing Immune Cell Survival

[0083] For immune cells to respond adequately to threats to the body, they must be able to survive for long enough to attack their targets. For therapies and research that require the ex vivo manipulation of immune cells, it is advantageous for the immune cells to proliferate. However, neither ex vivo culture conditions nor certain in vivo environments (for example the environment within a solid tumor) are optimal for growth of immune cells. For example, T-cells from heavily pre-treated lymphoma patients show lower rates of ex vivo expansion and clinical response when engineered with anti-CD19 chimeric antigen receptor than T-cells from untreated patients. There is therefore a need for methods that enhance the function, persistence and proliferation of human immune cells, particularly under conditions that are naturally hostile to the immune cells.

### T-Cell Transformation Elements

[0084] One approach to enhance the persistence and proliferation of human immune cells is to integrate genetic elements to increase growth and/or survival into the genome of the immune cell. Candidate genetic elements for enhancing immune cell survival include genes found to be mutated in immune cell cancers. However, transformation of a cell into a cancer cell is typically thought to require a series of mutations, and the role of each mutation may not be directly related to cell survival or growth. For example, many mutations are known to simply increase the chance that additional mutations will occur. Thus, even though there may be correlations whereby mutations in certain genes often occur in immune cell cancers, it is generally not the case that introducing that same mutated gene into an immune cell will enhance the growth or survival of that cell. Testing can therefore be performed to determine whether integration into the genome of an immune cell, of a heterologous polynucleotide comprising a gene comprising naturally occurring mutations will increase the survival and proliferation of that cell.

[0085] We sought to identify genes that can be provided on a heterologous polynucleotide and integrated into the genome of an immune cell, to confer upon that immune cell a growth or survival benefit. To do this we synthesized polynucleotides comprising genes having a sequence encoding a naturally occurring mutant human protein including an activating mutation operably linked to a heterologous promoter effective for expression of the protein in an immune cell, and integrated these heterologous polynucleotides into the genomes of T-cells. We then measured the growth and survival of these T-cells in ex vivo culture, as described in Section 6.2.

### STAT3

[0086] The gene encoding STAT3 (signal transducer and activator of transcription 3) is often found to be mutated in large granular lymphocytic leukemia. These activating mutations are frequently in the SH2 domain of STAT3, and include S614R, E616K, G618R, Y640F, N6471, E652K, K658Y, K658R, K658N, K658M, K658R, K658H, K658N, D661Y and D661V. Activating mutations in STAT3 have also been found outside the SH2 domain, for example F174S and H410R. As described in Sections 6.2.1.1 and 6.2.1.5, we have demonstrated that a heterologous polynucleotide encoding an activating mutant of a STAT3 protein may be introduced into an immune cell to enhance its survival or its proliferation; a gene encoding an activating mutant of STAT3 is an immune cell survival-enhancing gene and an immune cell proliferation-enhancing gene as described in Section 6.2. A polynucleotide encoding a protein comprising a modified version of STAT3, e.g., SEQ ID NO: 232), whose sequence comprises one or more mutations selected from F174S, H410R, S614R, E616K, G618R, Y640F, N6471, E652K, K658Y, K658R, K658N, K658M, K658R, K658H, K658N, D661Y and D661V is an embodiment of the invention. Exemplary mutated STAT3 proteins include SEQ ID NOs 246-250. Preferred embodiments comprise a polynucleotide comprising a nucleic acid encoding an STAT3 protein comprising an activating mutation, wherein the nucleic acid is operably linked to a heterologous promoter. Exemplary heterologous promoters that may be operably linked to the nucleic acid encoding an activating mutant of STAT3 include an EF1 promoter, a PGK promoter, a GAPDH promoter, an EEF2 promoter, a ubiquitin promoter, an SV40 promoter or an HSVTK promoter, for example a sequence selected from SEQ ID NOs 94-154. Preferred embodiments comprise a polynucleotide comprising a nucleic acid encoding an activating mutant of STAT3, wherein the nucleic acid is operably linked to a heterologous polyadenylation signal, for example a polyadenylation signal from a virus that infects mammalian cells, a mammalian EF1 polyadenylation signal, a mammalian growth hormone polyadenylation signal or a mammalian globin polyadenylation signal, for example a sequence selected from SEQ ID NOs 160-217. Preferred embodiments comprise a polynucleotide comprising a gene encoding an activating mutant of STAT3, wherein the polynucleotide is part of a piggyBac-like transposon which further comprises sequences with SEQ ID NOs: 6 and 7, or sequences with SEQ ID NOs: 14 and 15, or sequences with SEQ ID NOs: 18 and 19, or sequences with SEQ ID NOs:20 and 21. Preferred embodiments comprise a polynucleotide comprising a gene encoding an activating mutant of STAT3, wherein the polynucleotide is part of a Mariner transposon such as a Sleeping Beauty transposon which further comprises a sequence that is 90% identical to SEQ ID NO: 24 and a sequence that is 90% identical to SEQ ID NO: 25. Preferred embodiments comprise a polynucleotide comprising a gene encoding an activating mutant of STAT3, wherein the polynucleotide is part of an hAT transposon such as a TcBuster transposon which further comprises a sequence that is 90% identical to SEQ ID NO: 397 and a sequence that is 90% identical to SEQ ID NO: 398. The transposon comprising the polynucleotide encoding the activating mutant of STAT3 may be introduced into the immune cell together with a corresponding transposase or a polynucleotide encoding a corresponding transposase. Preferred embodiments comprise a polynucleotide comprising a gene encoding an activating mutant of STAT3, wherein the polynucleotide is part of a lentiviral vector. The lentiviral vector comprising the polynucleotide encoding the mutated STAT3 protein may be packaged and used to infect the immune cell. The immune cell is preferably a T-cell.

[0087] One aspect of the present invention is an immune cell whose genome comprises a heterologous polynucleotide comprising a gene encoding a STAT3 protein with an activating mutation. In some embodiments the heterologous polynucleotide comprises a lentiviral vector, or a piggyBac-like transposon, or a Mariner transposon such as a Sleeping Beauty transposon, or an hAT transposon such as a TcBuster transposon. In some embodiments, the immune cell genome comprises 3 copies of the STAT3 gene: two endogenous copies and one heterologous mutant copy.

### CD28

[0088] The CD28 (Cluster of Differentiation 28) gene is often found mutated in peripheral T-cell lymphomas. The most common activating mutations are D124E, D124V, T1951 and T195P. As described in Sections 6.2.1.2 and 6.2.1.3, we have demonstrated that a heterologous polynucleotide encoding an activating mutant of a CD28 protein may be introduced into an immune cell to enhance its survival or its proliferation, and to reduce restimulation-induced cell death; a gene encoding an activating mutant of CD28 is an immune cell survival-enhancing gene and an immune cell proliferation-enhancing gene as described in Section 6.2. A polynucleotide encoding a protein comprising a modified version of CD28 (e.g., SEQ ID NO: 233), whose sequence comprises one or more mutations selected from D124E, D124V, T1951 and T195P is an embodiment of the invention. An exemplary mutated CD28 protein is given as SEQ ID NO: 251. The mutated CD28 may further comprise replacement of the secretion signal in the first 18 amino acids of SEQ ID NO: 233 with another functionally active secretion signal. Preferred embodiments comprise a polynucleotide comprising a nucleic acid encoding an activating mutant of CD28, wherein the nucleic acid is operably linked to a heterologous promoter. Exemplary heterologous promoters that may be operably linked to the nucleic acid encoding mutated CD28 include an EF1 promoter, a PGK promoter, a GAPDH promoter, an EEF2 promoter, a ubiquitin promoter, an SV40 promoter or an HSVTK promoter, for example a sequence selected from SEQ ID NOs 94-154. Preferred embodiments comprise a polynucleotide comprising a nucleic acid encoding an activating mutant of CD28, wherein the nucleic acid is operably linked to a heterologous polyadenylation signal, for example a polyadenylation signal from a virus that infects mammalian cells, a mammalian EF1 polyadenylation signal, a mammalian growth hormone polyadenylation signal or a mammalian globin polyadenylation signal, for example a sequence selected from SEQ ID NOs 160-217. Preferred embodiments comprise a polynucleotide comprising a gene encoding an activating mutant of CD28, wherein the polynucleotide is part of a piggyBac-like transposon which further comprises sequences with SEQ ID NOs: 6 and 7, or sequences with SEQ ID NOs: 14 and 15, or sequences with SEQ ID NOs: 18 and 19, or sequences with SEQ ID NOs: 20 and 21. Preferred embodiments comprise a polynucleotide comprising a gene encoding an activating mutant of CD28, wherein the polynucleotide is part of a Mariner transposon such as a Sleeping Beauty transposon which further comprises a sequence that is 90% identical to SEQ ID NO: 24 and a sequence that is 90% identical to SEQ ID NO: 25. Preferred embodiments comprise a polynucleotide comprising a gene encoding an activating mutant of CD28, wherein the polynucleotide is part of an hAT transposon such as a TcBuster transposon which further comprises a sequence that is 90% identical to SEQ ID NO: 397 and a sequence that is 90% identical to SEQ ID NO: 398. The transposon comprising the polynucleotide encoding the activating mutant of CD28 may be introduced into the immune cell together with a corresponding transposase or a polynucleotide encoding a corresponding transposase. Preferred embodiments comprise a polynucleotide comprising a gene encoding an activating mutant of CD28, wherein the polynucleotide is part of a lentiviral vector. The lentiviral vector comprising the polynucleotide encoding the activating mutant of CD28 may be packaged and used to infect the immune cell. The immune cell is preferably a T-cell.

[0089] One aspect of the present invention is an immune cell whose genome comprises a heterologous polynucleotide comprising a gene encoding a CD28 protein with an activating mutation. In some embodiments the heterologous polynucleotide comprises a lentiviral vector, or a piggyBac-like transposon, or a Mariner transposon such as a Sleeping Beauty transposon, or an hAT transposon such as a TcBuster transposon. In some embodiments, the immune cell genome comprises 3 copies of the CD28 gene: two endogenous copies and one heterologous mutant copy.

### RhoA

[0090] The RhoA small GTPase is frequently mutated in peripheral T-cell lymphomas. The most common lymphoma-associated mutations are G17V and K18N. An activating mutant of a RhoA protein may be introduced into an immune cell to enhance its survival or its proliferation; a gene encoding an activating mutant of RhoA is an immune cell survival-enhancing gene and an immune cell proliferation-enhancing gene as described in Section 6.2. A polynucleotide encoding a protein comprising a modified version of RhoA, e.g., SEQ ID NO: 234, whose sequence comprises a mutation selected from G17V and K18N or a combination thereof is an embodiment of the invention. Exemplary mutated RhoA proteins are given as SEQ ID NOs: 252 and 253. Preferred embodiments comprise a polynucleotide comprising a nucleic acid encoding a mutated RhoA protein, wherein the nucleic acid is operably linked to a heterologous promoter. Exemplary heterologous promoters that may be operably linked to the gene encoding mutated RhoA include an EF1 promoter, a PGK promoter, a GAPDH promoter, an EEF2 promoter, a ubiquitin promoter, an SV40 promoter or an HSVTK promoter, for example a sequence selected from SEQ ID NOs 94-154. Preferred embodiments comprise a polynucleotide comprising a nucleic acid encoding a mutated RhoA protein, wherein the nucleic acid is operably linked to a heterologous polyadenylation signal, for example a polyadenylation signal from a virus that infects mammalian cells, a mammalian EF1 polyadenylation signal, a mammalian growth hormone polyadenylation signal or a mammalian globin polyadenylation signal, for example a sequence selected from SEQ ID NOs 160-217. Preferred embodiments comprise a polynucleotide comprising a gene encoding a mutated RhoA protein, wherein the polynucleotide is part of a piggyBac-like transposon which further comprises sequences with SEQ ID NOs: 6 and 7, or sequences with SEQ ID NOs: 14 and 15, or sequences with SEQ ID NOs: 18 and 19, or sequences with SEQ ID NOs: 20 and 21. Preferred embodiments comprise a polynucleotide comprising a gene encoding a mutated RhoA protein, wherein the polynucleotide is part of a Mariner transposon such as a Sleeping Beauty transposon which further comprises a sequence that is 90% identical to SEQ ID NO: 24 and a sequence that is 90% identical to SEQ ID NO: 25. Preferred embodiments comprise a polynucleotide comprising a gene encoding a mutated RhoA protein, wherein the polynucleotide is part of an hAT transposon such as a TcBuster transposon which further comprises a sequence that is 90% identical to SEQ ID NO: 397 and a sequence that is 90% identical to SEQ ID NO: 398. The transposon comprising the polynucleotide encoding the mutated RhoA protein may introduced into the immune cell together with a polynucleotide encoding a corresponding transposase. Preferred embodiments comprise a polynucleotide comprising a gene encoding a mutated RhoA protein, wherein the polynucleotide is part of a lentiviral vector. The lentiviral vector comprising the polynucleotide encoding the mutated RhoA protein may be packaged and used to infect the immune cell. The immune cell is preferably a T-cell.

[0091] One aspect of the present invention is an immune cell whose genome comprises a heterologous polynucleotide comprising a gene encoding a RhoA protein with an activating mutation. In some embodiments the heterologous polynucleotide comprises a lentiviral vector, or a piggyBac-like transposon, or a Mariner transposon such as a Sleeping Beauty transposon, or an hAT transposon such as a TcBuster transposon. In some embodiments, the immune cell genome comprises 3 copies of the RhoA gene: two endogenous copies and one heterologous mutant copy.

### Phospholipase C, Gamma 1

[0092] Activating phospholipase C gamma (PLCG) mutations have been associated with cutaneous T-cell lymphomas. The most common lymphoma-associated activating mutations are S345F, S520F and R707Q. As described in Section 6.2.1.5, we have demonstrated that a heterologous polynucleotide encoding an activating mutant of a PLCG protein may be introduced into an immune cell to enhance its survival or its proliferation; a gene encoding an activating mutant of PLCG is an immune cell survival-enhancing gene and an immune cell proliferation-enhancing gene as described in Section 6.2. A polynucleotide encoding a protein comprising a modified version of PLCG, e.g., SEQ ID NO: 235, whose sequence comprises one or more mutations selected from S345F, S520F and R707Q is an embodiment of the invention. An exemplary mutated PLCG protein is given as SEQ ID NO: 254. Preferred embodiments comprise a polynucleotide comprising a gene encoding an activating mutant of PLCG, wherein the nucleic acid is operably linked to a heterologous promoter. Exemplary heterologous promoters that may be operably linked to the gene encoding mutated PLCG include an EF1 promoter, a PGK promoter, a GAPDH promoter, an EEF2 promoter, a ubiquitin promoter, an SV40 promoter or an HSVTK promoter, for example a sequence selected from SEQ ID NOs 94-154. Preferred embodiments comprise a polynucleotide comprising a nucleic acid encoding an activating mutant of PLCG, wherein the nucleic acid is operably linked to a heterologous polyadenylation signal, for example a polyadenylation signal from a virus that infects mammalian cells, a mammalian EF1 polyadenylation signal, a mammalian growth hormone polyadenylation signal or a mammalian globin polyadenylation signal, for example a sequence selected from SEQ ID NOs 160-217. Preferred embodiments comprise a polynucleotide comprising a gene encoding an activating mutant of PLCG, wherein the polynucleotide is part of a piggyBac-like transposon which further comprises sequences with SEQ ID NOs: 6 and 7, or sequences with SEQ ID NOs: 14 and 15, or sequences with SEQ ID NOs: 18 and 19, or sequences with SEQ ID NOs: 20 and 21. Preferred embodiments comprise a polynucleotide comprising a gene encoding an activating mutant of PLCG, wherein the polynucleotide is part of a Mariner transposon such as a Sleeping Beauty transposon which further comprises a sequence that is 90% identical to SEQ ID NO: 24 and a sequence that is 90% identical to SEQ ID NO: 25. Preferred embodiments comprise a polynucleotide comprising a gene encoding a mutated PLCG protein, wherein the polynucleotide is part of an hAT transposon such as a TcBuster transposon which further comprises a sequence that is 90% identical to SEQ ID NO: 397 and a sequence that is 90% identical to SEQ ID NO: 398. The transposon comprising the polynucleotide encoding the mutated PLCG protein may be introduced into the immune cell together with a corresponding transposase or a polynucleotide encoding a corresponding transposase. Preferred embodiments comprise a polynucleotide comprising a gene encoding a mutated PLCG protein, wherein the polynucleotide is part of a lentiviral vector. The lentiviral vector comprising the polynucleotide encoding the mutated PLCG protein may be packaged and used to infect the immune cell. The immune cell is preferably a T-cell.

[0093] One aspect of the present invention is an immune cell whose genome comprises a heterologous polynucleotide comprising a gene encoding a PLCG protein with an activating mutation. In some embodiments the heterologous polynucleotide comprises a lentiviral vector, or a piggyBac-like transposon, or a Mariner transposon such as a Sleeping Beauty transposon, or an hAT transposon such as a TcBuster transposon. In some embodiments, the immune cell genome comprises 3 copies of the PLCG gene: two endogenous copies and one heterologous mutant copy.

### STAT5B

[0094] The gene encoding STAT5B (signal transducer and activator of transcription 5B) is sometimes found to be mutated in T-cell leukemias. The most common leukemia-associated activating mutation is N642H in the SH2 domain. Other STAT5B activating mutations associated with T-cell cancers include SH2 domain mutations T648S, S652Y and Y665F, as well as P267A outside the SH2 domain. A heterologous polynucleotide encoding an activating mutant of a STAT5B protein may be introduced into an immune cell to enhance its survival or its proliferation; a gene encoding an activating mutant of STAT5B is an immune cell survival-enhancing gene and an immune cell proliferation-enhancing gene as described in Section 6.2. A polynucleotide encoding a protein comprising a modified version of STAT5B (e.g., SEQ ID NO: 236), whose sequence comprises one or more mutations selected from N642H, T648S, S652Y, Y665F and P267A is an embodiment of the invention. An exemplary mutated STAT5B protein is given as SEQ ID NO: 255. Preferred embodiments comprise a polynucleotide comprising a nucleic acid encoding a mutated STAT5B protein, wherein the nucleic acid is operably linked to a heterologous promoter. Exemplary heterologous promoters that may be operably linked to the gene encoding mutated STAT5B include an EF1 promoter, a PGK promoter, a GAPDH promoter, an EEF2 promoter, a ubiquitin promoter, an SV40 promoter or an HSVTK promoter, for example a sequence selected from SEQ ID NOs 94-154. Preferred embodiments comprise a polynucleotide comprising a gene encoding a mutated STAT5B protein, wherein the gene is operably linked to a heterologous polyadenylation signal, for example a polyadenylation signal from a virus that infects mammalian cells, a mammalian EF1 polyadenylation signal, a mammalian growth hormone polyadenylation signal or a mammalian globin polyadenylation signal, for example a sequence selected from SEQ ID NOs 160-217. Preferred embodiments comprise a polynucleotide comprising a gene encoding a mutated STAT5B protein, wherein the polynucleotide is part of a piggyBac-like transposon which further comprises sequences with SEQ ID NOs: 6 and 7, or sequences with SEQ ID NOs: 14 and 15, or sequences with SEQ ID NOs: 18 and 19, or sequences with SEQ ID NOs: 20 and 21. Preferred embodiments comprise a polynucleotide comprising a gene encoding an activating mutant of STAT5B, wherein the polynucleotide is part of a Mariner transposon such as a Sleeping Beauty transposon which further comprises a sequence that is 90% identical to SEQ ID NO: 24 and a sequence that is 90% identical to SEQ ID NO: 25. Preferred embodiments comprise a polynucleotide comprising a gene encoding a mutated STAT5B protein, wherein the polynucleotide is part of an hAT transposon such as a TcBuster transposon which further comprises a sequence that is 90% identical to SEQ ID NO: 397 and a sequence that is 90% identical to SEQ ID NO: 398. The transposon comprising the polynucleotide encoding the mutated STAT5B protein may be introduced into the immune cell together with a corresponding transposase or a polynucleotide encoding a corresponding transposase. Preferred embodiments comprise a polynucleotide comprising a gene encoding a mutated STAT5B protein, wherein the polynucleotide is part of a lentiviral vector. The lentiviral vector comprising the polynucleotide encoding the mutated STAT5B protein may be packaged and used to infect the immune cell. The immune cell is preferably a T-cell.

[0095] One aspect of the present invention is an immune cell whose genome comprises a heterologous polynucleotide comprising a gene encoding a STAT5B protein with an activating mutation. In some embodiments the heterologous polynucleotide comprises a lentiviral vector, or a piggyBac-like transposon, or a Mariner transposon such as a Sleeping Beauty transposon, or an hAT transposon such as a TcBuster transposon. In some embodiments, the immune cell genome comprises 3 copies of the STAT5B gene: two endogenous copies and one heterologous mutant copy.

### Survivin

[0096] The gene encoding Survivin (a member of the Inhibitor of Apoptosis family of proteins) is sometimes found to be upregulated in T-cell leukemias. As described in Section 6.2.1.3, we have demonstrated that a heterologous polynucleotide encoding a Survivin gene operably linked to a heterologous promoter may be introduced into an immune cell to enhance its survival or its proliferation, and to reduce restimulation-induced cell death; a Survivin gene operably linked to a heterologous promoter is an immune cell survival-enhancing gene and an immune cell proliferation-enhancing gene as described in Section 6.2. A polynucleotide encoding a protein comprising SEQ ID NO: 237 operably linked to a heterologous promoter is an embodiment of the invention. Exemplary heterologous promoters that may be operably linked to the gene encoding Survivin include an EF1 promoter, a PGK promoter, a GAPDH promoter, an EEF2 promoter, a ubiquitin promoter, an SV40 promoter or an HSVTK promoter, for example a sequence selected from SEQ ID NOs 94-154. Preferred embodiments comprise a polynucleotide comprising a gene encoding Survivin, wherein the gene is operably linked to a heterologous polyadenylation signal, for example a polyadenylation signal from a virus that infects mammalian cells, a mammalian EF1 polyadenylation signal, a mammalian growth hormone polyadenylation signal or a mammalian globin polyadenylation signal, for example a sequence selected from SEQ ID NOs 160-217. Preferred embodiments comprise a polynucleotide comprising a gene encoding Survivin, wherein the polynucleotide is part of a piggyBac-like transposon which further comprises sequences with SEQ ID NOs: 6 and 7, or sequences with SEQ ID NOs: 14 and 15, or sequences with SEQ ID NOs: 18 and 19, or sequences with SEQ ID NOs: 20 and 21. Preferred embodiments comprise a polynucleotide comprising a gene encoding Survivin wherein the polynucleotide is part of a Mariner transposon such as a Sleeping Beauty transposon which further comprises a sequence that is 90% identical to SEQ ID NO: 24 and a sequence that is 90% identical to SEQ ID NO: 25. Preferred embodiments comprise a polynucleotide comprising a gene encoding a gene encoding Survivin, wherein the polynucleotide is part of an hAT transposon such as a TcBuster transposon which further comprises a sequence that is 90% identical to SEQ ID NO: 397 and a sequence that is 90% identical to SEQ ID NO: 398. The transposon comprising the polynucleotide encoding Survivin may be introduced into the immune cell together with a corresponding transposase or a polynucleotide encoding a corresponding transposase. Preferred embodiments comprise a polynucleotide comprising a gene encoding Survivin, wherein the polynucleotide is part of a lentiviral vector. The lentiviral vector comprising the polynucleotide encoding Survivin may be packaged and used to infect the immune cell. The immune cell is preferably a T-cell or a B-cell.

[0097] One aspect of the present invention is an immune cell whose genome comprises a heterologous polynucleotide comprising a gene encoding Survivin and further comprising a lentiviral vector, or a piggyBac-like transposon, or a Mariner transposon such as a Sleeping Beauty transposon, or an hAT transposon such as a TcBuster transposon. In some embodiments, the immune cell genome comprises 3 copies of the Survivin gene: two endogenous copies and one heterologous copy operably linked to a heterologous promoter.

### Bel-XL

[0098] The gene encoding Bcl-XL (an anti-apoptotic protein) is sometimes found to be unregulated in B-cell lymphomas. As described in Section 6.2.1.5 and Section 6.2.1.6, we have demonstrated that a heterologous polynucleotide encoding a Bcl-XL gene operably linked to a heterologous promoter may be introduced into an immune cell to enhance its survival or its proliferation, and to reduce restimulation-induced cell death; a Bcl-XL gene operably linked to a heterologous promoter is an immune cell survival-enhancing gene and an immune cell proliferation-enhancing gene as described in Section 6.2. A polynucleotide encoding a protein comprising SEQ ID NO: 238 operably linked to a heterologous promoter is an embodiment of the invention. Exemplary heterologous promoters that may be operably linked to a nucleic acid encoding Bcl-XL include an EF1 promoter, a PGK promoter, a GAPDH promoter, an EEF2 promoter, a ubiquitin promoter, an SV40 promoter or an HSVTK promoter, for example a sequence selected from SEQ ID NOs 94-154. Preferred embodiments comprise a polynucleotide comprising a nucleic acid encoding Bcl-XL, wherein the nucleic acid is operably linked to a heterologous polyadenylation signal, for example a polyadenylation signal from a virus that infects mammalian cells, a mammalian EF1 polyadenylation signal, a mammalian growth hormone polyadenylation signal or a mammalian globin polyadenylation signal for example a sequence selected from SEQ ID NOs 160-217. Preferred embodiments comprise a polynucleotide comprising a gene encoding Bcl-XL, wherein the polynucleotide is part of a piggyBac-like transposon which further comprises sequences with SEQ ID NOs: 6 and 7, or sequences with SEQ ID NOs: 14 and 15, or sequences with SEQ ID NOs: 18 and 19, or sequences with SEQ ID NOs: 20 and 21. Preferred embodiments comprise a polynucleotide comprising a gene encoding Bcl-XL wherein the polynucleotide is part of a Mariner transposon such as a Sleeping Beauty transposon which further comprises a sequence that is 90% identical to SEQ ID NO: 24 and a sequence that is 90% identical to SEQ ID NO: 25. Preferred embodiments comprise a polynucleotide comprising a gene encoding a gene encoding Bcl-XL, wherein the polynucleotide is part of an hAT transposon such as a TcBuster transposon which further comprises a sequence that is 90% identical to SEQ ID NO: 397 and a sequence that is 90% identical to SEQ ID NO: 398. The transposon comprising the polynucleotide encoding Bcl-XL may be introduced into the immune cell together with a polynucleotide encoding a corresponding transposase. Preferred embodiments comprise a polynucleotide comprising a gene encoding Bcl-XL, wherein the polynucleotide is part of a lentiviral vector. The lentiviral vector comprising the polynucleotide encoding Bcl-XL may be packaged and used to infect the immune cell. The immune cell is preferably a T-cell or a B-cell.

[0099] One aspect of the present invention is an immune cell whose genome comprises a heterologous polynucleotide comprising a gene encoding Bcl-XL and further comprising a lentiviral vector, or a piggyBac-like transposon, or a Mariner transposon such as a Sleeping Beauty transposon, or an hAT transposon such as a TcBuster transposon. In some embodiments, the immune cell genome comprises 3 copies of the Bcl-XL gene: two endogenous copies and one heterologous copy operably linked to a heterologous promoter.

### CCND1

[0100] The gene encoding CCND1 (cyclin D1) is sometimes found to be mutated in leukemias. CCND1 mutations associated with cancers include E36G, E36Q, E36K, A39S, S41L, S41P, S41T, V42E, V42A, V42L, V42M, Y44S, Y44D, Y44C, Y44H, K46T, K46R, K46N, K46E, C47G, C47R, C47S, C47W, P199R, P199S, P199L, S201F, T2851, T285A, P286L, P286H, P286S, P286T and P286A. A heterologous polynucleotide encoding an activating mutant of a CCND1 protein may be introduced into an immune cell to enhance its survival or its proliferation; a gene encoding an activating mutant of CCND1 is an immune cell survival-enhancing gene and an immune cell proliferation-enhancing gene as described in Section 6.2. A polynucleotide encoding a protein comprising a modified version of CCND1 (e.g., SEQ ID NO: 239), whose sequence comprises one or more mutations selected from E36G, E36Q, E36K, A39S, S41L, S41P, S41T, V42E, V42A, V42L, V42M, Y44S, Y44D, Y44C, Y44H, K46T, K46R, K46N, K46E, C47G, C47R, C47S, C47W, P199R, P199S, P199L, S201F, T2851, T285A, P286L, P286H, P286S, P286T and P286A is an embodiment of the invention. An exemplary mutated CCND1 protein is given as SEQ ID NO: 256. Preferred embodiments comprise a polynucleotide comprising a nucleic acid encoding a mutated CCND1 protein, wherein the nucleic acid is operably linked to a heterologous promoter. Exemplary heterologous promoters that may be operably linked to the nucleic acid encoding mutated CCND1 include an EF1 promoter, a PGK promoter, a GAPDH promoter, an EEF2 promoter, a ubiquitin promoter, an SV40 promoter or an HSVTK promoter, for example a sequence selected from SEQ ID NOs 94-154. Preferred embodiments comprise a polynucleotide comprising a nucleic acid encoding a mutated CCND1 protein, wherein the nucleic acid is operably linked to a heterologous polyadenylation signal, for example a polyadenylation signal from a virus that infects mammalian cells, a mammalian EF1 polyadenylation signal, a mammalian growth hormone polyadenylation signal or a mammalian globin polyadenylation signal, for example a sequence selected from SEQ ID NOs 160-217. Preferred embodiments comprise a polynucleotide comprising a gene encoding a mutated CCND1 protein, wherein the polynucleotide is part of a piggyBac-like transposon which further comprises sequences with SEQ ID NOs: 6 and 7, or sequences with SEQ ID NOs: 14 and 15, or sequences with SEQ ID NOs: 18 and 19, or sequences with SEQ ID NOs: 20 and 21. Preferred embodiments comprise a polynucleotide comprising a gene encoding an activating mutant of CCND1, wherein the polynucleotide is part of a Mariner transposon such as a Sleeping Beauty transposon which further comprises a sequence that is 90% identical to SEQ ID NO: 24 and a sequence that is 90% identical to SEQ ID NO: 25. Preferred embodiments comprise a polynucleotide comprising a gene encoding a gene encoding an activating mutant of CCND1, wherein the polynucleotide is part of an hAT transposon such as a TcBuster transposon which further comprises a sequence that is 90% identical to SEQ ID NO: 397 and a sequence that is 90% identical to SEQ ID NO: 398. The transposon comprising the polynucleotide encoding the mutated CCND1 protein may introduced into the immune cell together with a polynucleotide encoding a corresponding transposase. Preferred embodiments comprise a polynucleotide comprising a gene encoding a mutated CCND1 protein, wherein the polynucleotide is part of a lentiviral vector. The lentiviral vector comprising the polynucleotide encoding the mutated CCND1 protein may be packaged and used to infect the immune cell. The immune cell is preferably a T-cell or a B-cell.

[0101] One aspect of the present invention is an immune cell whose genome comprises a heterologous polynucleotide comprising a gene encoding a CCND1 protein with an activating mutation. In some embodiments the heterologous polynucleotide comprises a lentiviral vector, or a piggyBac-like transposon, or a Mariner transposon such as a Sleeping Beauty transposon, or a hAT transposon such as a TcBuster transposon. In some embodiments, the immune cell genome comprises 3 copies of the CCND1 gene: two endogenous copies and one heterologous mutant copy.

### Bcl2

[0102] The gene encoding Bcl2 (an anti-apoptotic protein) is sometimes found to be upregulated in B-cell lymphomas. As described in Section 6.2.1.4, we have demonstrated that a heterologous polynucleotide encoding a Bcl2 gene operably linked to a heterologous promoter may be introduced into an immune cell to enhance its survival or its proliferation; a Bcl2 gene operably linked to a heterologous promoter is an immune cell survival-enhancing gene and an immune cell proliferation-enhancing gene as described in Section 6.2. A polynucleotide encoding a protein comprising SEQ ID NO: v270 or 272 operably linked to a heterologous promoter is an embodiment of the invention. Exemplary heterologous promoters that may be operably linked to a nucleic acid encoding Bcl2 include an EF1 promoter, a PGK promoter, a GAPDH promoter, an EEF2 promoter, a ubiquitin promoter, an SV40 promoter or an HSVTK promoter, for example a sequence selected from SEQ ID NOs 94-154. Preferred embodiments comprise a polynucleotide comprising a nucleic acid encoding Bcl2, wherein the nucleic acid is operably linked to a heterologous polyadenylation signal, for example a polyadenylation signal from a virus that infects mammalian cells, a mammalian EF1 polyadenylation signal, a mammalian growth hormone polyadenylation signal or a mammalian globin polyadenylation signal, for example a sequence selected from SEQ ID NOs 160-217. Preferred embodiments comprise a polynucleotide comprising a gene encoding Bcl2, wherein the polynucleotide is part of a piggyBac-like transposon which further comprises sequences with SEQ ID NOs: 6 and 7, or sequences with SEQ ID NOs: 14 and 15, or sequences with SEQ ID NOs: 18 and 19, or sequences with SEQ ID NOs: 20 and 21. Preferred embodiments comprise a polynucleotide comprising a gene encoding Bcl2 wherein the polynucleotide is part of a Mariner transposon such as a Sleeping Beauty transposon which further comprises a sequence that is 90% identical to SEQ ID NO: 24 and a sequence that is 90% identical to SEQ ID NO: 25. Preferred embodiments comprise a polynucleotide comprising a gene encoding a gene encoding Bcl2, wherein the polynucleotide is part of an hAT transposon such as a TcBuster transposon which further comprises a sequence that is 90% identical to SEQ ID NO: 397 and a sequence that is 90% identical to SEQ ID NO: 398. The transposon comprising the polynucleotide encoding Bcl2 may be introduced into the immune cell together with a polynucleotide encoding a corresponding transposase. Preferred embodiments comprise a polynucleotide comprising a gene encoding Bcl2, wherein the polynucleotide is part of a lentiviral vector. The lentiviral vector comprising the polynucleotide encoding Bcl2 may be packaged and used to infect the immune cell. The immune cell is preferably a T-cell or a B-cell.

[0103] One aspect of the present invention is an immune cell whose genome comprises a heterologous polynucleotide comprising a gene encoding Bcl2 and further comprising a lentiviral vector, or a piggyBac-like transposon, or a Mariner transposon such as a Sleeping Beauty transposon, or an hAT transposon such as a TcBuster transposon. In some embodiments, the immune cell genome comprises 3 copies of the Bcl2 gene: two endogenous copies and one heterologous copy operably linked to a heterologous promoter.

### Bcl6

[0104] The gene encoding Bcl6 (an anti-apoptotic protein) is sometimes found to be unregulated in B-cell lymphomas. As described in Section 6.2.1.4, we have demonstrated that a heterologous polynucleotide encoding a Bcl6 gene operably linked to a heterologous promoter may be introduced into an immune cell to enhance its survival or its proliferation; a Bcl6 gene operably linked to a heterologous promoter is an immune cell survival-enhancing gene and an immune cell proliferation-enhancing gene as described in Section 6.2. A polynucleotide encoding a protein comprising SEQ ID NO: 271 or 272 operably linked to a heterologous promoter is an embodiment of the invention. Exemplary heterologous promoters that may be operably linked to a nucleic acid encoding Bcl6 include an EF1 promoter, a PGK promoter, a GAPDH promoter, an EEF2 promoter, a ubiquitin promoter, an SV40 promoter or an HSVTK promoter, for example a sequence selected from SEQ ID NOs 94-154. Preferred embodiments comprise a polynucleotide comprising a nucleic acid encoding Bcl6, wherein the nucleic acid is operably linked to a heterologous polyadenylation signal, for example a polyadenylation signal from a virus that infects mammalian cells, a mammalian EF1 polyadenylation signal, a mammalian growth hormone polyadenylation signal or a mammalian globin polyadenylation signal for example a sequence selected from SEQ ID NOs 160-217. Preferred embodiments comprise a polynucleotide comprising a gene encoding Bcl6, wherein the polynucleotide is part of a piggyBac-like transposon which further comprises sequences with SEQ ID NOs: 6 and 7, or sequences with SEQ ID NOs: 14 and 15, or sequences with SEQ ID NOs: 18 and 19, or sequences with SEQ ID NOs: 20 and 21. Preferred embodiments comprise a polynucleotide comprising a gene encoding Bcl6 wherein the polynucleotide is part of a Mariner transposon such as a Sleeping Beauty transposon which further comprises a sequence that is 90% identical to SEQ ID NO: 24 and a sequence that is 90% identical to SEQ ID NO: 25. Preferred embodiments comprise a polynucleotide comprising a gene encoding a gene encoding Bcl6, wherein the polynucleotide is part of an hAT transposon such as a TcBuster transposon which further comprises a sequence that is 90% identical to SEQ ID NO: 397 and a sequence that is 90% identical to SEQ ID NO: 398. The transposon comprising the polynucleotide encoding Bcl6 may be introduced into the immune cell together with a corresponding transposase or a polynucleotide encoding a corresponding transposase. Preferred embodiments comprise a polynucleotide comprising a gene encoding Bcl6, wherein the polynucleotide is part of a lentiviral vector. The lentiviral vector comprising the polynucleotide encoding Bcl6 may be packaged and used to infect the immune cell. The immune cell is preferably a T-cell or a B-cell.

[0105] One aspect of the present invention is an immune cell whose genome comprises a heterologous polynucleotide comprising a gene encoding Bcl6 and further comprising a lentiviral vector or a piggyBac-like transposon. In some embodiments, the immune cell genome comprises 3 copies of the Bcl6 gene: two endogenous copies and one heterologous copy operably linked to a heterologous promoter.

### Enhanced Signalling Receptors

[0106] Immune cells such as T-cells express membrane proteins that comprise an extracellular domain that binds to naturally occurring and synthetic ligands, a transmembrane domain and an intracellular domain that interacts with intracellular signaling pathways. We have designed, synthesized and tested a set of chimeric receptors, which we call Enhanced Signaling Receptors (ESRs), which comprise an extracellular domain derived from a first protein, a transmembrane domain and an intracellular domain derived from a receptor that transmits a stimulatory or co-stimulatory signal to an immune cell. Unlike chimeric antigen receptors, however, ESRs do not comprise a sequence comprising the intracellular portion of the CD3 zeta chain. One function of ESRs is to enhance immune cell survival. Another function of ESRs is to counteract the engagement of T-cell inhibitory pathways, for example by tumor cells acting on inhibitory receptors (Tay et al, 2017. Immunotherapy 9, 1339-1349). For ESRs to function effectively, they must be expressed at high enough levels to compete with the natural inhibitory receptor for the inhibitory ligand being presented within the tumor microenvironment.

[0107] In one embodiment, the extracellular domain of the ESR may be derived from the extracellular ligand binding domain of a receptor that naturally transmits an inhibitory signal to an immune cell: in this case an ESR receives what is normally interpreted as an inhibitory signal and transduces it as stimulatory signal. For example the extracellular domain of an ESR may comprise a sequence derived from the extracellular domain of a protein selected from TNFRSF1A, TNFRSF3 (LTRβ), TNFRSF6 (Fas), TNFRSF8 (CD30), TNFRSF10A (DR4), TNFRSF10B (DR5), TNFRSF19 (TROY), TNFRSF21 (DR6) and CTLA4; preferably the extracellular domain is derived from a human protein. In some embodiments of the invention the extracellular domain of an ESR comprises a polypeptide whose sequence is at least 90% identical, or at least 95% identical, or at least 96% identical or at least 97% identical to or at least 98% identical to or at least 99% or 100% identical to a sequence selected from SEQ ID NOs: 322-330.

[0108] In another embodiment, the extracellular domain of the ESR may be derived from a protein that binds to a protein expressed on the surface of an immune cell, preferably a protein whose normal function is to stimulate immune function: in this case an ESR transmits a stimulatory signal to another immune cell and transduces a stimulatory signal to the immune cell in which it is expressed. For example the ESR extracellular domain may comprise the variable domain of an antibody, a single chain antibody, a single domain antibody, a nanobody, a V_{H}H fragment or a V_{NAR} fragment that binds to the extracellular domain of a protein selected from TNFRSF4 (OX40), TNFRSF5 (CD40), TNFRSF7 (CD27), TNFRSF9 (4-1BB), TNFRSF11A (RANK), TNFRSF13B (TACI), TNFRSF13C (BAFF-R), TNFRSF14 (HVEM), TNFRSF17 (CD269), TNFRSF18 (GITR), CD28, CD28H (TMIGD2), Inducible T-cell Costimulator (ICOS/CD278), DNAX Accessory Molecule-1 (DNAM-1/CD226), Signaling Lymphocytic Activation Molecule (SLAM/CD150), T-cell Immunoglobulin and Mucin domain (TIM-1/HAVcr-1), interferon receptor alpha chain (IFNAR1), interferon receptor beta chain IFNAR2), interleukin-2 receptor beta subunit (IL2RB) and interleukin-2 receptor gamma subunit (IL2RG). An exemplary single chain anti-CD28 antibody is TGN1412, with sequence SEQ ID NO: 340.

[0109] In another embodiment, the extracellular domain of the ESR may be derived from a ligand that binds to a receptor expressed on the surface of an immune cell, preferably a receptor whose normal function is to transduce a stimulatory or co-stimulatory signal in the immune cell: in this case an ESR transmits a stimulatory signal to another immune cell and transduces a stimulatory signal to the immune cell in which it is expressed. For example, the ESR extracellular domain may comprise a sequence derived from the extracellular domain of a protein selected from TNFSF4 (OX40 ligand), TNFSF5 (CD40 ligand), TNFSF9 (4-1BB ligand), TNFSF11 (RANKL), TNFSF14 (HVEM ligand), TNFSF13B, CD80, CD86 and ICOS ligand; preferably the extracellular domain is derived from a human protein. In some embodiments of the invention the extracellular domain of an ESR comprises a polypeptide whose sequence is at least 90% identical, or at least 95% identical, or at least 96% identical or at least 97% identical to or at least 98% identical to or at least 99% identical to a sequence selected from SEQ ID NOs: 331-339.

[0110] In some embodiments of the invention, an Enhanced Signaling Receptor comprises a sequence derived from the intracellular domain of a member of the Tumor Necrosis Factor Receptor Superfamily (TNFRSF) or another immune cell receptor that normally transmits a stimulatory signal to an immune cell; in some embodiments of the invention the ESR comprises a sequence derived from the intracellular domain of a protein selected from TNFRSF4 (OX40), TNFRSF5 (CD40), TNFRSF7 (CD27), TNFRSF9 (4-1BB), TNFRSF (RANK), TNFRSF13B (TACI), TNFRSF13C (BAFF-R), TNFRSF14 (HVEM), TNFRSF17 (CD269), TNFRSF18 (GITR), CD28, CD28H (TMIGD2), Inducible T-cell Costimulator (ICOS/CD278), DNAX Accessory Molecule-1 (DNAM-1/CD226), Signaling Lymphocytic Activation Molecule (SLAM/CD150), T-cell Immunoglobulin and Mucin domain (TIM-1/HAVcr-1), interferon receptor alpha chain (IFNAR1), interferon receptor beta chain IFNAR2), interleukin-2 receptor beta subunit (IL2RB), interleukin-2 receptor gamma subunit (IL2RG), Tumor Necrosis Factor Superfamily 14 (TNFSF14/LIGHT), Natural Killer Group 2 member D (NKG2D/CD314) and CD40 ligand (CD40L); preferably the intracellular domain is of a human protein. In some embodiments of the invention the ESR comprises a polypeptide whose sequences is at least 90% identical, or at least 95% identical, or at least 96% identical or at least 97% identical to or at least 98% identical to or at least 99% or 100% identical to a sequence selected from SEQ ID NOs: 341-364.

[0111] In some embodiments of the invention, an Enhanced Signaling Receptor comprises a sequence derived from the transmembrane domain of a member of the Tumor Necrosis Factor Receptor Superfamily (TNFRSF) or another immune cell receptor that normally transmits an inhibitory or stimulatory signal to an immune cell; in some embodiments of the invention the ESR comprises a sequence derived from the transmembrane domain of a protein selected from TNFRSF1A, TNFRSF1B, TNFRSF3 (LTRβ), TNFRSF6 (Fas), TNFRSF8 (CD30), TNFRSF10A (DR4), TNFRSF10B (DR5), TNFRSF19 (TROY), TNFRSF21 (DR6), CTLA4, TNFRSF4 (OX40), TNFRSF5 (CD40), TNFRSF7 (CD27), TNFRSF9 (4-1BB), TNFRSF11A (RANK), TNFRSF13B (TACI), TNFRSF13C (BAFF-R), TNFRSF14 (HVEM), TNFRSF17 (CD269), TNFRSF18 (GITR), CD28, CD28H (TMIGD2), Inducible T-cell Costimulator (ICOS/CD278), DNAX Accessory Molecule-1 (DNAM-1/CD226), Signaling Lymphocytic Activation Molecule (SLAM/CD150), T-cell Immunoglobulin and Mucin domain (TIM-1/HAVcr-1), interferon receptor alpha chain (IFNAR1), interferon receptor beta chain IFNAR2), interleukin-2 receptor beta subunit (IL2RB), interleukin-2 receptor gamma subunit (IL2RG), Tumor Necrosis Factor Superfamily 14 (TNFSF14/LIGHT), Natural Killer Group 2 member D (NKG2D/CD314) and CD40 ligand (CD40L); preferably the transmembrane domain is of a human protein; in some embodiments of the invention the ESR comprises a polypeptide whose sequences is at least 90% identical, or at least 95% identical, or at least 96% identical or at least 97% identical to or at least 98% identical to or at least 99% or 100% identical to a sequence selected from SEQ ID NOs: 365-396.

[0112] In some embodiments of the invention, an Enhanced Signaling Receptor comprises a sequence at least 90% identical, or at least 95% identical, or at least 96% identical or at least 97% identical to or at least 98% identical to or at least 99% or 100% identical to a sequence selected from SEQ ID NOs: 274-318. These sequences comprise an N-terminal secretion signal (for example MLGIWTLLPLVLTSVARLSSKSVNA, MEQRPRGCAAVAAALLLVLLGARAQG, MGLSTVPDLLLPLVLLELLVGIYPSGVIG, MGTSPSSSTALASCSRIARRATATMIAGSLLLLGFLSTTTA, MEQRGQNAPAASGARKRHGPGPREARGARPGPRVPKTLVLVVAAVLLLVSAES and MAVMAPRTLVLLLSGALALTQTWA are signal sequences for these ESRs). Signal sequences function to translocate the ESR into the membrane. The signal sequence of an ESR is removed by a signal peptidase and does not form a part of the final receptor, so any functional secretion signal may be replaced by another functional secretion signal without altering the activity of the ESR. Such replacements are expressly contemplated. An Enhanced Signaling Receptor comprises a sequence at least 90% identical, or at least 95% identical, or at least 96% identical or at least 97% identical to or at least 98% identical to or at least 99% or 100% identical to the non-signal sequence portion of a sequence selected from SEQ ID NOs: 274-318.

[0113] In some embodiments of the invention, a gene encoding an ESR is expressed in an immune cell, for example a T-cell, and increases the survival or the proliferation of the immune cell, or the ability of a T-cell to kill a cell within a tumor microenvironment. An immune cell whose genome comprises a gene encoding an ESR that increases the survival or the proliferation of the immune cell or the ability of a T-cell to kill a cell within a tumor microenvironment is an aspect of the invention.

[0114] Preferred embodiments comprise a polynucleotide comprising a gene encoding an ESR, wherein the gene is operably linked to a heterologous promoter. Exemplary heterologous promoters that may be operably linked to the gene encoding an ESR include an EF1 promoter, a PGK promoter, a GAPDH promoter, an EEF2 promoter, a ubiquitin promoter, an SV40 promoter or an HSVTK promoter, for example a sequence selected from SEQ ID NOs 94-154. Preferred embodiments comprise a polynucleotide comprising a gene encoding an ESR, wherein the gene is operably linked to a heterologous polyadenylation signal, for example a polyadenylation signal from a virus that infects mammalian cells, a mammalian EF1 polyadenylation signal, a mammalian growth hormone polyadenylation signal or a mammalian globin polyadenylation signal, for example a sequence selected from SEQ ID NOs 160-217. Some embodiments comprise a polynucleotide comprising a gene encoding an ESR, wherein the polynucleotide is part of a lentiviral vector. The lentiviral vector comprising the polynucleotide encoding the ESR may be packaged and used to infect the immune cell. More preferably the ESR is encoded on a gene transfer polynucleotide that is part of a piggyBac-like transposon, for example a polynucleotide which further comprises sequences with SEQ ID NOs: 6 and 7, or sequences with SEQ ID NOs: 14 and 15, or sequences with SEQ ID NOs: 18 and 19, or sequences with SEQ ID NOs: 20 and 21. The ESR may be encoded on a gene transfer polynucleotide that is part of a Mariner transposon such as a Sleeping Beauty transposon which further comprises a sequence that is 90% identical to SEQ ID NO: 24 and a sequence that is 90% identical to SEQ ID NO: 25. The ESR may be encoded on a gene transfer polynucleotide that is part of an hAT transposon such as a TcBuster transposon which further comprises a sequence that is 90% identical to SEQ ID NO: 397 and a sequence that is 90% identical to SEQ ID NO: 398. The gene transfer polynucleotide comprising the transposon plus the polynucleotide encoding the ESR may further comprise a gene encoding a chimeric antigen receptor. The gene transfer polynucleotide may be introduced into the immune cell together with a corresponding transposase, which may be provided as a polynucleotide encoding the transposase. The immune cell is preferably a T-cell.

[0115] One aspect of the present invention is an immune cell whose genome comprises a heterologous polynucleotide comprising a gene encoding an ESR. In some embodiments the heterologous polynucleotide comprises a lentiviral vector, or a piggyBac-like transposon, or a Mariner transposon such as a Sleeping Beauty transposon, or a hAT transposon such as a TcBuster transposon.

[0116] In some embodiments a second gene expressed in the immune cell potentiates the effect of the ESR to increase the survival or proliferation of the immune cell. An immune cell whose genome comprises a gene encoding an ESR and a second gene that potentiates the activity of the ESR in increasing the survival or the proliferation of the immune cell (the ESR potentiating gene) is an aspect of the invention. In some embodiments the second gene is operably linked to a heterologous promoter; in some embodiments the second gene encodes an inhibitor of the apoptotic pathway; in some embodiments the inhibitor of the apoptotic pathway is a dominant negative gene in the caspase pathway for example a dominant negative mutant of Caspase 3, Caspase 7, Caspase 8, Caspase 9, Caspase 10 or CASP8 and FADD-like apoptosis regulator (CFLAR); in some embodiments the inhibitor of the apoptotic pathway comprises a dominant negative mutant of a sequence selected from among SEQ ID NO: 240-245; in some embodiments the inhibitor of the apoptotic pathway comprises a sequence selected from among SEQ ID NO: 237, 238 or 261-272.

[0117] Preferably the half-life of immune cells expressing an ESR and an ESR-potentiating gene is increased by at least 5%, or at least 10%, or at least 15%, or at least 20%, or at least 25%, or at least 30%, or at least 35%, or at least 40%, or at least 45%, or at least 50%, or at least 55%, or at least 60%, or at least 65%, or at least 70%, or at least 75%, or at least 80%, or at least 85%, or at least 90%, or at least 95%, or at least 100% relative to the half-life of immune cells that are not expressing an immune cell survival-enhancing gene. Preferably the maximum life span of immune cells expressing an ESR and an ESR-potentiating gene is increased by at least 5%, or at least 10%, or at least 15%, or at least 20%, or at least 25%, or at least 30%, or at least 35%, or at least 40%, or at least 45%, or at least 50%, or at least 55%, or at least 60%, or at least 65%, or at least 70%, or at least 75%, or at least 80%, or at least 85%, or at least 90%, or at least 95%, or at least 100% relative to the maximum life span of immune cells that are not expressing an immune cell survival-enhancing gene. Preferably the doubling time of immune cells not expressing an ESR and an ESR-potentiating gene is greater by at least 5%, or at least 10%, or at least 15%, or at least 20%, or at least 25%, or at least 30%, or at least 35%, or at least 40%, or at least 45%, or at least 50%, or at least 55%, or at least 60%, or at least 65%, or at least 70%, or at least 75%, or at least 80%, or at least 85%, or at least 90%, or at least 95%, or at least 100% relative to the doubling time of immune cells that are expressing an ESR and an ESR-potentiating gene. Preferably the proliferation rate of immune cells expressing an ESR and an ESR-potentiating gene is increased by at least 5%, or at least 10%, or at least 15%, or at least 20%, or at least 25%, or at least 30%, or at least 35%, or at least 40%, or at least 45%, or at least 50%, or at least 55%, or at least 60%, or at least 65%, or at least 70%, or at least 75%, or at least 80%, or at least 85%, or at least 90%, or at least 95%, or at least 100% relative to the proliferation rate of immune cells that are not expressing an ESR and an ESR-potentiating gene.

[0118] Preferred embodiments comprise a polynucleotide comprising a nucleic acid encoding an inhibitor of apoptosis, wherein the nucleic acid is operably linked to a heterologous promoter. Exemplary heterologous promoters that may be operably linked to the gene encoding an inhibitor of apoptosis include an EF1 promoter, a PGK promoter, a GAPDH promoter, an EEF2 promoter, a ubiquitin promoter, an SV40 promoter or an HSVTK promoter, for example a sequence selected from SEQ ID NOs 94-154. Preferred embodiments comprise a polynucleotide comprising a nucleic acid encoding an inhibitor of apoptosis, wherein the nucleic acid is operably linked to a heterologous polyadenylation signal, for example a polyadenylation signal from a virus that infects mammalian cells, a mammalian EF1 polyadenylation signal, a mammalian growth hormone polyadenylation signal or a mammalian globin polyadenylation signal, for example a sequence selected from SEQ ID NOs 160-217. Preferred embodiments comprise a polynucleotide comprising a gene encoding an inhibitor of apoptosis, wherein the polynucleotide is part of a piggyBac-like transposon which further comprises sequences with SEQ ID NOs: 6 and 7, or sequences with SEQ ID NOs: 14 and 15, or sequences with SEQ ID NOs: 18 and 19, or sequences with SEQ ID NOs: 20 and 21. Preferred embodiments comprise a polynucleotide comprising a gene encoding an inhibitor of apoptosis, wherein the polynucleotide is part of a Mariner transposon such as a Sleeping Beauty transposon which further comprises a sequence that is 90% identical to SEQ ID NO: 24 and a sequence that is 90% identical to SEQ ID NO: 25. Preferred embodiments comprise a polynucleotide comprising a gene encoding an inhibitor of apoptosis, wherein the polynucleotide is part of an hAT transposon such as a TcBuster transposon which further comprises a sequence that is 90% identical to SEQ ID NO: 397 and a sequence that is 90% identical to SEQ ID NO: 398. The piggyBac-like transposon comprising the polynucleotide encoding the inhibitor of apoptosis may introduced into the immune cell together with a polynucleotide encoding a corresponding transposase. Preferred embodiments comprise a polynucleotide comprising a gene encoding an inhibitor of apoptosis, wherein the polynucleotide is part of a lentiviral vector. The lentiviral vector comprising the polynucleotide encoding the inhibitor of apoptosis may be packaged and used to infect the immune cell. The immune cell is preferably a T-cell or a B-cell.

[0119] One aspect of the present invention is an immune cell whose genome comprises a heterologous polynucleotide comprising a gene encoding an inhibitor of apoptosis. In some embodiments the heterologous polynucleotide comprises a lentiviral vector, or a piggyBac-like transposon, or a Mariner transposon such as a Sleeping Beauty transposon, or an hAT transposon such as a TcBuste transposon.

[0120] Optionally the polynucleotide comprising a gene encoding the ESR further comprises a second gene encoding an inhibitor of apoptosis operably linked to a heterologous promoter.

### FAS/4-1BB

[0121] As an exemplary ESR in which the extracellular domain of an inhibitory receptor is fused to the intracellular domain of a co-stimulatory receptor, we designed an ESR comprising the extracellular domain of TNFRSF6 (Fas) (SEQ ID NO: 323), and further comprising the transmembrane domain of TNFRSF6 (Fas) (SEQ ID NO: 387) and further comprising the intracellular domain of TNFRSF9 (4-1BB) (SEQ ID NO: 344). This ESR (Fas/4-1BB) comprising sequence SEQ ID NO: 274 is an immune cell survival-enhancing gene and an immune cell proliferation-enhancing gene as described in Section 6.2. The activity of Fas/4-1BB is potentiated by an inhibitor of apoptosis: a dominant negative version of Casp7: Casp7-DN (SEQ ID NO: 262). The effectiveness of Fas/4-1BB plus Casp7-DN in enhancing immune cell survival and immune cell proliferation is shown in Sections 6.2.1.2 and 6.2.2.2.

[0122] A polynucleotide comprising a gene encoding Fas/4-1BB (SEQ ID NO: 274) is an aspect of the invention. An immune cell whose genome comprises a gene encoding Fas/4-1BB is an aspect of the invention. A polynucleotide comprising a gene encoding Fas/4-1BB and further comprising a gene encoding an inhibitor of apoptosis is an aspect of the invention; in some embodiments the inhibitor of apoptosis is a dominant negative mutant of Casp 7, for example SEQ ID NO: 262. Preferably the polynucleotide is a transposon. An immune cell whose genome comprises a gene encoding Fas/4-1BB and a dominant negative inhibitor of apoptosis is an aspect of the invention. Such an immune cell is particularly advantageous for ex-vivo growth in cell culture.

Anti-CD28/OX40 is an ESR with Proliferation-Enhancing Activity

[0123] As an exemplary ESR in which the extracellular domain comprises the binding domain from an antibody which is fused to the intracellular domain of a co-stimulatory receptor, we designed an ESR whose extracellular domain comprised the binding domain of CD28 agonist antibody TGN1412 (SEQ ID NO: 340) fused to the transmembrane domain for TNFRSF4 (OX40) (SEQ ID NO: 373) and the intracellular domain for TNFRSF4 (OX40) (SEQ ID NO: 341). The sequence of the anti-CD28/OX40 ESR is given as (SEQ ID NO: 307). The effectiveness of this ESR in promoting T-cell proliferation is described in Section 6.2.2.1.

[0124] A polynucleotide comprising a gene encoding an anti-CD28/OX40 ESR (for example SEQ ID NO: ESR34) is an aspect of the invention. An immune cell whose genome comprises a gene encoding an anti-CD28/OX40 ESR is an aspect of the invention. Such an immune cell is particularly advantageous for ex-vivo growth in cell culture.

[0125] The present invention also features kits comprising a transposase as a protein or encoded by a nucleic acid, and/or a transposon; or a gene transfer system as described herein comprising a transposase as a protein or encoded by a nucleic acid as described herein, in combination with a transposon; optionally together with a pharmaceutically acceptable carrier, adjuvant or vehicle, and optionally with instructions for use. Any of the components of the inventive kit may be administered and/or transfected into cells in a subsequent order or in parallel, e.g. a transposase protein or its encoding nucleic acid may be administered and/or transfected into a cell as defined above prior to, simultaneously with or subsequent to administration and/or transfection of a transposon. Alternatively, a transposon may be transfected into a cell as defined above prior to, simultaneously with or subsequent to transfection of a transposase protein or its encoding nucleic acid. If transfected in parallel, preferably both components are provided in a separated formulation and/or mixed with each other directly prior to administration to avoid transposition prior to transfection. Additionally, administration and/or transfection of at least one component of the kit may occur in a time staggered mode, e.g. by administering multiple doses of this component.

### EXAMPLES

[0126] The following examples illustrate the methods, compositions and kits disclosed herein and should not be construed as limiting in any way. Various equivalents will be apparent from the following examples; such equivalents are also contemplated to be part of the invention disclosed herein.

### Gene Transfer System Elements for Expression in Immune Cells

### Transposon Elements in a Human T-Cell Line

[0127] Jurkat cells are an immortalized line of human T-cells, they are useful for testing gene transfer systems for their effectiveness in human immune cells, particularly T-cells. We tested the ability of Xenopus and Bombyx piggyBac-like transposases to transpose their corresponding transposons into the genome of the Jurkat human T-cell line.

[0128] A polynucleotide (CD19-GFP-LPN1, with nucleotide sequence given by SEQ ID NO: 223) comprising a Xenopus transposon was constructed in which a nucleic acid encoding CD19 (with amino acid sequence given by SEQ ID NO: 228) was operably linked to an EF1 promoter with sequence given by SEQ ID NO: 94 and a bovine growth hormone polyadenylation signal sequence with SEQ ID NO: 174. The CD19 gene was flanked on one side by an HS4 insulator (SEQ ID NO: 92), and on the other by a D4Z4 insulator (SEQ ID NO: 88). The gene transfer polynucleotide further comprised, on the distal side of one insulator, a target sequence 5′-TTAA-3′, immediately followed by a piggyBac-like transposon inverted terminal repeat sequence SEQ ID NO: ITR 8 (which is an embodiment of SEQ ID NO: 6), immediately followed by additional transposon end sequences with SEQ ID NO: 1. The gene transfer polynucleotide further comprised, on the distal side of the other insulator, additional transposon end sequences with SEQ ID NO: 4, immediately followed by a piggyBac-like transposon inverted terminal repeat sequence SEQ ID NO: 9 (which is an embodiment of SEQ ID NO: 7) immediately followed by a target sequence 5′-TTAA-3′. The transposon further comprised a polynucleotide encoding GFP operably linked to a CMV promoter and a bovine growth hormone polyadenylation signal sequence. The CD19 and GFP genes were placed such that transposition of the piggyBac-like Xenopus transposon by its corresponding transposase transposes the CD19 gene, but leaves the GFP gene behind in the plasmid.

[0129] A polynucleotide (CD19-RFP-LPN2, with nucleotide sequence given by SEQ ID NO: 224) comprising a Bombyx transposon was constructed in which a gene encoding CD19 (SEQ ID NO: 228) was operably linked to an EF1 promoter with sequence given by SEQ ID NO: 94 and a bovine growth hormone polyadenylation signal sequence with SEQ ID NO: 174. The CD19 gene was flanked on one side by an HS4 insulator (SEQ ID NO: 92), and on the other by a D4Z4 insulator (SEQ ID NO: 88). The gene transfer polynucleotide further comprised, on the distal side of one insulator, a target sequence 5′-TTAA-3′, immediately followed by a piggyBac-like transposon inverted terminal repeat sequence SEQ ID NO: 14, immediately followed by additional transposon end sequences with SEQ ID NO: 12. The gene transfer polynucleotide further comprised, on the distal side of the other insulator, additional transposon end sequences with SEQ ID NO: 13, immediately followed by a piggyBac-like transposon inverted terminal repeat sequence SEQ ID NO: 15 immediately followed by a target sequence 5′-TTAA-3′. The transposon further comprised a polynucleotide encoding RFP operably linked to a CMV promoter and a bovine growth hormone polyadenylation signal sequence. The CD19 and RFP genes were placed such that transposition of the piggyBac-like Bombyx transposon by its corresponding transposase transposes the CD19 gene, but leaves the RFP gene behind in the plasmid.

[0130] One sample of Jurkat cells (200,000 cells per transfection) was transfected with 1 ng of CD19-GFP-LPN1 plasmid DNA and 100 ng of transposase mRNA encoding Xenopus transposase with sequence given by SEQ ID NO: 37, using a Neon electroporator according to the manufacturer's instructions. A second sample of Jurkat cells (200,000 cells per transfection) were transfected with 1 μg of CD19-RFP-LPN2 plasmid DNA and 100 ng of Bombyx transposase mRNA encoding transposase with sequence given by SEQ ID NO: 68, using a Neon electroporator according to the manufacturer's instructions. After various times, cells were labeled with an anti-CD19 antibody and the percentage of cells expressing CD19 was determined by flow cytometry. The results are shown in Table 1. Initially about 85% of the transfected cells showed CD19 expression (Table 1 row 1). This corresponds to a combination of expression from plasmid that has been taken up into the cells, and from transposons that have been stably integrated into the T-cell line genome. Over the next 10 days, the percentage of cells expressing CD19 fell to 18% for cells transfected with the Xenopus piggyBac-like transposon and 27% for cells transfected with the Bombyx piggyBac-like transposon (Table 1 row 3). This corresponds to loss of expression from cells in which CD19 genes have not been integrated into the genome. From about 15 days post-transfection until at least 55 days post-transfection, the percentage of cells expressing CD19 remained approximately constant (Table 1 rows 3-6). During all this time cells were growing and dividing. The plasmid has no way to replicate in a human cell, so the only way for a cell to keep expressing CD19 is if the CD19 gene is integrated into the genome which then replicates the CD19 gene at each cell division along with the rest of the genome. The rate of integration through random fragmentation is very low: between 0.01 and 1% of cells might be expected to integrate transfected DNA. The percentage of cells that integrated the CD19 gene was much higher than the frequency that would be expected to result from random integration, but consistent with the frequency that might be expected from transposition. Cells were also analyzed for the expression of GFP and RFP. By day 55 there was no detectable GFP or RFP expression. As described above, the GFP and RFP genes were placed on a part of the gene transfer plasmid that was not transposable by the transposase. GFP and RFP expression would therefore be expected if the gene transfer plasmids had integrated into the cell genome by random fragmentation and integration. However, if the CD19 gene integrated as a result of transposition, the GFP or RFP gene would be left behind in the plasmid and would be gradually degraded over time. The high genomic integration frequency and the lack of expression of non-transposable genes lead us to conclude that gene transfer systems based on the Xenopus and Bombyx piggyBac-like transposon systems are both capable of integrating polynucleotides into human T-cells.

[0131] At 70 days post-transfection, we used fluorescence activated cell sorting to sort cells expressing CD19 from those that were not expressing CD19. These cells were then maintained in liquid culture for over 240 days and analyzed at various times to assess the stability of integration. FIG. 1 shows the expression of CD19 on the y-axis, and the expression of the fluorescent protein on the x-axis, 155 days post-transfection and 85 days post-FACS sorting. Essentially all cells were still expressing CD19, and no cells were expressing a fluorescent protein. Identical results were obtained 240 days post-transfection. We conclude that Xenopus and Bombyx piggyBac-like transposons are stably maintained, even in the absence of selective pressure, for at least 240 days. We also note that the maintenance of expression indicates that the gene encoded on the transposon has not been silenced during more than 200 cell generations. Gene transfer systems based on the Xenopus and Bombyx piggyBac-like transposon systems are thus both useful for delivering genes for expression into human T-cells.

### Promoter Elements in T-Cells

[0132] Promoter test in Jurkat Cells

[0133] Jurkat cells are an immortalized line of human T-cells, they are useful for testing gene transfer systems for their effectiveness in human immune cells, particularly T-cells.

[0134] Promoter elements, optionally combined with intron elements, were cloned into a transposon for expression of human CD19, by introducing them between a first polynucleotide with sequence given by SEQ ID NO: 218 and a second polynucleotide with sequence given by SEQ ID NO: 219 to generate a circular plasmid comprising an insulator sequence with sequence given by SEQ ID NO: 90, an insulator sequence with sequence given by SEQ ID NO: 93, and flanked by a pair of transposon ends, one comprising sequence SEQ ID NO: 8 which is an embodiment of SEQ ID NO: 6 and one comprising sequence SEQ ID NO: 9 which is an embodiment of SEQ ID NO: 7. Jurkat cells (200,000 cells per transfection) were transfected with 1 μg of plasmid DNA and 100 ng of transposase mRNA encoding Xenopus transposase with amino acid sequence SEQ ID NO: 37, using a Neon electroporator according to the manufacturer's instructions.

[0135] Samples were taken for FACS analysis at various times after transfection, and the fraction of live cells expressing CD19 on their surfaces was counted and is shown in Table 2. Table 2 shows that cells into which CD19 was operably linked to EF1 (e.g. SEQ ID NOs: 94 and 132) and EEF2 (e.g. SEQ ID NO: 108) showed a high initial percentage of CD19-expressing cells (column D), but this was not sustained (e.g. columns F and G). For example, the percentage of cells expressing rat EF1-driven CD19 fell from 87% to 25% between day 2 and day 23, similarly the percentage of cells expressing human EF1-driven CD19 fell from 76% to 37% between day 2 and day 23. In contrast, when CD19 was operably linked to GAPDH, ubiquitin and PGK promoters, the cells showed much more consistently sustained levels of expression, with about 50% of cells expressing CD19 at each sample time between day 2 and day 23 (columns D-G). Column H shows the percentage decline in CD19-expressing cells between day 2 and day 23.

[0136] CD19 is a molecule expressed on the cell surface. Substantial over-expression of transmembrane proteins can be toxic. We therefore reasoned that the promoters that showed the most dramatic losses of CD19-expressing cells might be those that were driving the strongest expression. To assess promoter strength, we operably linked each of the promoters to a gene encoding GFP and transfected the genes in triplicate into HEK cells. After 2 days the fluorescence was measured in a fluorimeter. The average fluorescence values are shown in Table 2, column I. The strongest promoters were EF1 and EEF2 (column I, rows 1, 2 and 6), and these were the same promoters that showed the most substantial declines in the percentage of CD19-expressing cells (Table 2 column H). In contrast the PGK, GAPDH and ubiquitin promoters were only 8.6%, 28% and 22% as active as the strongest EF1 promoter, but the percentage of cells expressing CD19 operably linked to these promoters was sustained. Moderately active promoters thus appear advantageous over highly active promoters for the expression of genes encoding transmembrane proteins in T-cells, as they produce high enough levels of transmembrane protein to achieve function without causing toxicity. Transmembrane proteins include T-cell receptors, chimeric antigen receptors and enhanced signaling receptors. Moderately active promoters include phosphoglycerate kinase promoters, glyceraldehyde-3-phosphate dehydrogenase promoters and ubiquitin promoters. They may also include highly active promoters that have been attenuated, for example by removal of an intron or partial deletion of the promoter, such as an attenuated EF1 promoter or an attenuated EEF2 promoter.

[0137] This is an unexpected result: most current work in expressing chimeric antigen receptors is performed with strongly active promoters such as CMV or EF1 promoters. In contrast, here we have found that such highly active promoters are disadvantageous when operably linked to a transmembrane protein. An advantageous gene transfer system for expression of genes encoding transmembrane proteins in a T-cell comprises a polynucleotide comprising a gene encoding the transmembrane protein operably linked to a promoter selected from a phosphoglycerate kinase promoter, a glyceraldehyde-3-phosphate dehydrogenase promoter a ubiquitin promoter, an attenuated EF1 promoter or an attenuated EEF2 promoter. Exemplary phosphoglycerate kinase promoter sequences are given as SEQ ID NO: 115-118. Exemplary glyceraldehyde-3-phosphate dehydrogenase promoter sequences are given as SEQ ID NO: 97-107. Exemplary ubiquitin promoter sequences are given as SEQ ID NO: 95 and 125-127. The polynucleotide may further comprise an insulator sequence selected from SEQ ID NO: 87-93. Preferably the gene transfer polynucleotide comprises transposon ends such that it is recognized and transposed by a corresponding transposase, that such transposition may insert the promoter and its operably linked gene into the genome of an immune cell such as a T-cell. The polynucleotide may be part of a piggyBac-like transposon which further comprises sequences with SEQ ID NOs: 6 and 7, or sequences with SEQ ID NOs: 14 and 15, or sequences with SEQ ID NOs: 18 and 19, or sequences with SEQ ID NOs: 20 and 21. The polynucleotide may be part of a Mariner transposon such as a Sleeping Beauty transposon which further comprises a sequence that is 90% identical to SEQ ID NO: 24 and a sequence that is 90% identical to SEQ ID NO: 25. The polynucleotide may be part of an hAT transposon such as a TcBuster transposon which further comprises a sequence that is 90% identical to SEQ ID NO: 397 and a sequence that is 90% identical to SEQ ID NO: 398. The experiment was repeated, and after 8 days, cells were labeled with an anti-CD19 antibody and mean fluorescent intensity of cells expressing CD19 at day 8 was measured by flow cytometry. Mean fluorescent intensity values are shown in Table 3 column D. For comparison, human B-cells which naturally express CD19 at around 22,000 molecules per cell were labeled and mean fluorescent intensity was measured. The mean fluorescent intensity of B cells was used to calculate the number of CD19 molecules expressed on the surfaces of the Jurkat cells, as shown in Table 3 column E. For all promoters tested, the number of CD19 molecules on the surface of each cell was between 2 and 5 times the number naturally found on B-cells. The mean fluorescent intensity of cells transfected with CD19 operably linked to an EF1 promoter was within 20% of the value of cells transfected with CD19 operably linked to a PGK promoter (compare Table 3 rows 5 and 6), even though the PGK promoter is known to be much less active than the EF1 promoter, for example as shown in Table 2 column I rows 5 and 6. We interpret this to be because cells in which expression of CD19 exceeds ˜5 times the number normally found on the surface of B-cells experience toxicity. EF1 is a stronger promoter, so a higher fraction of cells transfected with CD19 operably linked to an EF1 promoter exceed this toxicity limit and die. This results in the loss of CD19-expressing cells observed between days 2 and 8 in Table 2 row 6. Moderately active promoters are thus capable of producing high levels of expression of transmembrane proteins, but the level is less likely to be so high as to be toxic. This is advantageous in transfection of T-cells with transmembrane proteins such as chimeric antigen receptors.

[0138] Table 3 shows that promoters with sequences given by SEQ ID NOs 94, 95, 98, 108, 115 and 132 were all effective in driving high levels of CD19 expression in Jurkat immortalized T-cells. An advantageous gene transfer system for expression of genes in a T-cell comprises a polynucleotide comprising a promoter with a sequence selected from SEQ ID NO: 94, 95, 98, 108, 115 and 132. An advantageous gene transfer system for expression of genes in a T-cell comprises a polynucleotide comprising an insulator sequence selected from SEQ ID NO: 87-91, and an insulator sequence selected from SEQ ID NO: 92 and 93. An advantageous gene transfer system for expression of genes in a T-cell comprises a polynucleotide comprising a transposon end comprising sequence SEQ ID NO: 6 and a transposon end comprising sequence SEQ ID NO: 7.

### Promoter Test in Primary T-Cells

[0139] Promoter elements were cloned into a transposon for expression of human CD19, by introducing them between a first polynucleotide with sequence given by SEQ ID NO: 220 and a second polynucleotide with sequence given by SEQ ID NO: 221 to generate a circular plasmid comprising an insulator sequence with sequence SEQ ID NO: 88, an insulator sequence with SEQ ID NO: 92, and flanked by a pair of transposon ends, one comprising target site 5′-TTAA-3′ immediately followed by sequence SEQ ID NO: 8 immediately followed by sequence SEQ ID NO: 1 and the other comprising sequence SEQ ID NO: 4 immediately followed by sequence SEQ ID NO: 9, immediately followed by target site 5′-TTAA-3′. Primary T-cells (200,000 cells per transfection) were transfected with 1 μg of plasmid DNA and 100 ng of transposase mRNA encoding Xenopus transposase with polypeptide sequence SEQ ID NO: 37, using a Neon electroporator according to the manufacturer's instructions. After 11 days, cells were labeled with an anti-CD19 antibody and mean fluorescent intensity was measured by flow cytometry.

[0140] Table 4 shows that promoters with sequences given by SEQ ID NOs: 97, 98 and 108-114 were all effective in driving high levels of CD19 expression in primary T-cells. It further shows that different levels of expression can be achieved by using different promoters. An advantageous gene transfer system for expression of genes in a T-cell comprises a polynucleotide comprising a promoter with a sequence selected from SEQ ID NO: 97, 98 and 108-114. An advantageous gene transfer system for expression of genes in a T-cell comprises a polynucleotide comprising a transposon end comprising sequence SEQ ID NO: 8 immediately followed by sequence SEQ ID NO: 1 and a transposon end comprising SEQ ID NO: 4 immediately followed by sequence SEQ ID NO: 9.

### Elements for Enhancing Survival and Efficacy of Immune Cells

[0141] An aspect of the present invention is the disclosure of sequences that can be used to enhance the survival, proliferation or expansion of immune cells.

[0142] Cell survival can be measured as the length of time that it takes for only half of the cells in a population to remain alive (the half-life), or the time it takes all the cells in a population to die (the maximum life span). Immune cells expressing an immune cell survival-enhancing gene will remain alive for longer than immune cells that are not expressing an immune cell survival-enhancing gene. One way of measuring this effect is to integrate a heterologous polynucleotide into the genome of the immune cell, wherein the heterologous polynucleotide comprises the immune cell survival-enhancing gene operably linked to regulatory sequences that cause it to be expressed within the immune cell, in other words is effective for expression in an immune cell. The heterologous polynucleotide further comprises a gene encoding a selectable marker, for example one that can be readily identified such as a fluorescent protein or a cell surface protein. Cells whose genomes comprise the heterologous polynucleotide express the immune cell survival-enhancing gene, and they can be identified by the presence of the selectable marker. Enhancement of survival can be measured as an increase in the half-life of immune cells expressing the immune cell survival-enhancing gene relative to immune cells that are not expressing the immune cell survival-enhancing gene. The half-life of immune cells expressing an immune cell survival-enhancing gene is increased by at least 5%, or at least 10%, or at least 15%, or at least 20%, or at least 25%, or at least 30%, or at least 35%, or at least 40%, or at least 45%, or at least 50%, or at least 55%, or at least 60%, or at least 65%, or at least 70%, or at least 75%, or at least 80%, or at least 85%, or at least 90%, or at least 95%, or at least 100% relative to the half-life of immune cells that are not expressing an immune cell survival-enhancing gene. The increase can be measured by comparing survival in equal size populations of a particular immune cell with and without a survival-enhancing gene. The maximum life span of immune cells expressing an immune cell survival-enhancing gene is increased by at least 5%, or at least 10%, or at least 15%, or at least 20%, or at least 25%, or at least 30%, or at least 35%, or at least 40%, or at least 45%, or at least 50%, or at least 55%, or at least 60%, or at least 65%, or at least 70%, or at least 75%, or at least 80%, or at least 85%, or at least 90%, or at least 95%, or at least 100% relative to the maximum life span of immune cells that are not expressing an immune cell survival-enhancing gene. Percentage changes in maximum lifespan can be measured by comparing equal sized populations of a particular immune cell with and without a survival-enhancing gene

[0143] Cell proliferation can be measured as the length of time that it takes the number of cells in a population to double (the doubling time), or as the fraction by which a cell population increases in a unit length of time (the proliferation rate). Immune cells expressing an immune cell proliferation-enhancing gene may divide for longer, or they may divide more rapidly than immune cells that are not expressing an immune cell proliferation-enhancing gene. One way of measuring this effect is to integrate a heterologous polynucleotide into the genome of the immune cell, wherein the heterologous polynucleotide comprises an immune cell proliferation-enhancing gene operably linked to regulatory sequences that cause it to be expressed within the immune cell. The heterologous polynucleotide further comprises a gene encoding a selectable marker, for example one that can be readily identified such as a fluorescent protein or a cell surface protein. Cells whose genomes comprise the heterologous polynucleotide express the immune cell proliferation-enhancing gene, and they can be identified by the presence of the selectable marker. Enhancement of proliferation can be measured as a decrease in the doubling time of immune cells expressing the immune cell proliferation-enhancing gene relative to immune cells that are not expressing the immune cell proliferation-enhancing gene. The doubling time of immune cells not expressing an immune cell proliferation-enhancing gene is greater by at least 5%, or at least 10%, or at least 15%, or at least 20%, or at least 25%, or at least 30%, or at least 35%, or at least 40%, or at least 45%, or at least 50%, or at least 55%, or at least 60%, or at least 65%, or at least 70%, or at least 75%, or at least 80%, or at least 85%, or at least 90%, or at least 95%, or at least 100% relative to the doubling time of immune cells that are expressing an immune cell proliferation-enhancing gene. The proliferation rate of immune cells expressing an immune cell proliferation-enhancing gene is increased by at least 5%, or at least 10%, or at least 15%, or at least 20%, or at least 25%, or at least 30%, or at least 35%, or at least 40%, or at least 45%, or at least 50%, or at least 55%, or at least 60%, or at least 65%, or at least 70%, or at least 75%, or at least 80%, or at least 85%, or at least 90%, or at least 95%, or at least 100% relative to the proliferation rate of immune cells that are not expressing an immune cell proliferation-enhancing gene. The proliferation rate or the doubling time may be measured at various times after the immune cell has begun expressing the immune cell proliferation-enhancing gene. The proliferation rate of immune cells expressing an immune cell proliferation-enhancing gene may be increased relative to the proliferation rate of the same immune cells that are not expressing an immune cell proliferation-enhancing gene 5 days after, or 10 days after, or 15 days after, or 20 days after, or 25 days after, or 30 days after, or 35 days after, or 40 days after, or 45 days after, or 50 days after, or 55 days after, or 60 days after the heterologous polynucleotide is integrated into the genome of the immune cells, or after the immune cells begin expressing the immune cell proliferation-enhancing gene.

[0144] Another aspect of the present invention is the disclosure of sequences that can be used to increase the length of time that immune cells can remain effective under conditions that reduce the efficacy of normal immune cells. Normal T-cells undergo apoptosis when repeatedly exposed to an antigen (“restimulation-induced cell death”), and those that do not die become unable to kill cells expressing the antigen (Voss et. al. (2017) Cancer Lett. 408: 190-196. “Metabolic reprogramming and apoptosis sensitivity: defining the contours of a T cell response”). Although this helps to reduce auto-immunity, it has been a contributing factor in preventing T cells from effectively combatting solid tumors. Under these circumstances it is thus desirable to retain immune cell function and prevent restimulation-induced cell death during repeated antigen exposure. Restimulation-induced cell death may be measured by counting the number of T-cells surviving after 2, 3, 4 or more exposures to an antigen, for example an antigen on a tumor cell. The ability of a heterologously expressed sequence to prevent restimulation-induced cell death may be measured by comparing the survival of T-cells expressing the sequence with the survival of T-cells that are not expressing the sequence, when both populations have the same extent and frequency of antigen exposure. Enhancement of survival can be measured as an increase in the number of remaining immune cells expressing the immune cell survival-enhancing gene relative to immune cells that are not expressing the immune cell survival-enhancing gene upon repeated exposure to an antigen. The number of surviving immune cells expressing an immune cell survival-enhancing gene is increased by at least 10%, or at least 20%, or at least 30%, or at least 40%, or at least 50%, or at least 60%, or at least 70%, or at least 80%, or at least 90%, or at least 100%, or at least 150%, or at least 200%, or at least 250%, or at least 300%, or at least 350%, or at least 400%, or at least 450%, or at least 500% relative to the number of surviving immune cells that are not expressing an immune cell survival-enhancing gene upon repeated exposure to an antigen for example expressed in a tumor cell.

[0145] Resistance to restimulation-induced cell death and sustained immune cell efficacy may be measured by counting the ability of T-cells to kill a cell such as a tumor cell after 2, 3, 4 or more exposures to the tumor cell. The ability of a heterologously expressed sequence to sustain immune cell function may be measured by comparing the cell killing activity of T-cells expressing the sequence with the cell killing activity of T-cells that are not expressing the sequence, when both populations have the same extent and frequency of antigen exposure. The cell killing activity of T-cells expressing a T-cell efficacy-enhancing gene is increased by at least 10%, or at least 20%, or at least 30%, or at least 40%, or at least 50%, or at least 60%, or at least 70%, or at least 80%, or at least 90%, or at least 100%, or at least 150%, or at least 200%, or at least 250%, or at least 300%, or at least 350%, or at least 400%, or at least 450%, or at least 500% relative to the number of surviving immune cells that are not expressing the T-cell efficacy-enhancing gene upon repeated exposure to a tumor cell.

### T-Cell Transformation Elements

### Expression of Mutated STAT3 in Primary T-Cells

[0146] A gene encoding a mutated version of STAT3: STAT3-Y640F was operably linked to a PGK promoter with sequence given by SEQ ID NO: 115 and a rabbit globin polyadenylation signal with sequence SEQ ID NO: 182 and cloned into a gene transfer polynucleotide. The gene transfer polynucleotide further comprised a GFP reporter (with sequence SEQ ID NO: 222) comprising a gene encoding DasherGFP operably linked to a glyceraldehyde-3-phosphate dehydrogenase (GAPDH) promoter and a bovine growth hormone (BGH) polyadenylation signal sequence. The two open reading frames were configured to be divergently transcribed (the two promoters were adjacent to each other and transcribed in opposite directions). The two open reading frames were flanked on one side by an HS4 insulator (with sequence SEQ ID NO: 92), and on the other by a D4Z4 insulator (with sequence SEQ ID NO: 88). The gene transfer polynucleotide further comprised, on the distal side of one insulator, a target sequence 5′-TTAA-3′, immediately followed by a piggyBac-like transposon inverted terminal repeat sequence SEQ ID NO: 10 (which is an embodiment of SEQ ID NO: 6), immediately followed by additional transposon end sequences SEQ ID NO: 3 (which is >95% identical to SEQ ID NO: 1). The gene transfer polynucleotide further comprised, on the distal side of the other insulator, additional transposon end sequences SEQ ID NO: 5 (which is >95% identical to SEQ ID NO: 4), immediately followed by a piggyBac-like transposon inverted terminal repeat sequence SEQ ID NO: 11 (which is an embodiment of SEQ ID NO: 7) immediately followed by a target sequence 5′-TTAA-3′.

[0147] T-cells were prepared from normal donor peripheral blood mononuclear cells (PBMCs) using the EasySep Human CD8 positive selection kit from Stemcell Technologies according to the manufacturer's instructions. T-cells were stimulated for 2-3 days by incubation with irradiated feeder cells to provide secreted CD3, CD28, IL-2, IL-7 and IL-15. Approximately 100,000 T-cells were transfected with 1 μg transposon DNA and 100 ng mRNA encoding transposase with polypeptide sequence SEQ ID NO: 37 using a Neon electroporator according to the manufacturer's instructions. Transfected T-cells were mixed with feeder cells and incubated at 37° C. Samples were taken at various times post-transfection, incubated with a fluorescently-labelled anti-CD8 antibody, and analyzed on a fluorescence-activated cell sorter (FACS) for CD8 and Dasher GFP.

[0148] FIG. 2 shows the distribution of cell staining over time. CD8 staining is used as a marker for CD8+ T-cells, and is shown on the y-axis of each of the FACS plots shown in Panel A. GFP fluorescence is shown on the x-axis of each FACS plot; GFP fluorescence indicates that the cell is expressing GFP, and is also used here as a marker to indicate the presence of the gene transfer polynucleotide within the cell. On day 14, approximately 97.8% of the cells showed strong CD8-staining (i.e. they are in the upper half of the FACS plot), and approximately 9.8% of the analyzed cells were both CD8+ and showed GFP fluorescence. The fraction of cells expressing CD8 and exhibiting GFP fluorescence increased over time: 23.9% at day 28, 41.1% at day 34, 62.4% at day 41 and 79.3% at day 48. The increase in the fraction of the T-cell population expressing GFP either indicates that the T-cells whose genomes comprise the gene transfer polynucleotide possess a survival advantage compared with the T-cells whose genomes do not comprise the gene transfer polynucleotide, or it indicates that the T-cells whose genomes comprise the gene transfer polynucleotide possess a proliferation advantage compared with the T-cells whose genomes do not comprise the gene transfer polynucleotide. Such survival or proliferation advantage originates not in the expression of GFP (we see many examples where GFP expression does not correlate with a survival or proliferation advantage), but in the expression of STAT3-Y640F. We conclude that expression of STAT3-Y640F in T-cells provides them with a survival or proliferation advantage, and that a gene encoding an activating mutant of STAT3 is an immune cell survival-enhancing gene and an immune cell proliferation-enhancing gene as described in Section 5.3.1.1.

### Expression of T-Cell Transformation Elements and ESRs in Primary T-Cells

[0149] Genes encoding a set of T-cell transformation elements and enhanced signaling receptors were cloned individually into separate gene transfer polynucleotides. In each case the gene was operably linked to a PGK promoter with sequence given by SEQ ID NO: 115 and a rabbit globin polyadenylation signal with sequence SEQ ID NO: 182 and cloned into a gene transfer polynucleotide. The gene transfer polynucleotide further comprised a GFP reporter (with sequence SEQ ID NO: 222) comprising a gene encoding DasherGFP operably linked to a glyceraldehyde-3-phosphate dehydrogenase (GAPDH) promoter and a bovine growth hormone (BGH) polyadenylation signal sequence. The two open reading frames were configured to be divergently transcribed (the two promoters were adjacent to each other and transcribed in opposite directions). The two open reading frames were flanked on one side by an HS4 insulator (with sequence SEQ ID NO: 92), and on the other by a D4Z4 insulator (with sequence SEQ ID NO: 88). The gene transfer polynucleotide further comprised, on the distal side of one insulator, a target sequence 5′-TTAA-3′, immediately followed by a piggyBac-like transposon inverted terminal repeat sequence SEQ ID NO: 10 (which is an embodiment of SEQ ID NO: 6), immediately followed by additional transposon end sequences SEQ ID NO: 3 (which is >95% identical to SEQ ID NO: 1). The gene transfer polynucleotide further comprised, on the distal side of the other insulator, additional transposon end sequences SEQ ID NO: 5 (which is >95% identical to SEQ ID NO: 4), immediately followed by a piggyBac-like transposon inverted terminal repeat sequence SEQ ID NO: 11 (which is an embodiment of SEQ ID NO: 7) immediately followed by a target sequence 5′-TTAA-3′.

[0150] T-cells were prepared from normal donor peripheral blood mononuclear cells (PBMCs) using the EasySep Human CD8 positive selection kit from Stemcell Technologies according the manufacturer's instructions. T-cells were stimulated for 2-3 days by incubation with irradiated feeder cells to provide secreted CD3, CD28, IL-2, IL-7 and IL-15. Approximately 100,000 T-cells were transfected with 1 μg transposon DNA and 100 ng mRNA encoding transposase with polypeptide sequence SEQ ID NO: 37 using a Neon electroporator according to the manufacturer's protocol. Transfected T-cells were mixed with feeder cells and incubated at 37° C. Samples were taken at 24 days post-transfection, incubated with a fluorescently-labelled anti-CD8 antibody, and analyzed on a fluorescence-activated cell sorter (FACS) for CD8 and Dasher GFP. The data is shown in Table 5.

[0151] As described in Section 6.2.1.1, the enrichment of CD8+ cells expressing GFP is an indicator that the gene transfer polynucleotide comprises a gene that confers a survival or a proliferation advantage to a T-cell, as also described in Section 5.3.1.1. In this set of gene transfer polynucleotides, CD19 was included as a cell-surface marker that is expected to have no effect on T-cell survival, we therefore used the percentage of cells expressing GFP in cells transfected with CD19 (3%, see Table 5 row 10) as a level against which to benchmark the putative survival-enhancing genes. T-cells transfected with a gene encoding CD28 with two activating mutations D124E and T195P had more than 10-times as many cells expressing GFP (Table 5 row 1) than did the cells transfected with CD19. Genes encoding an antibody fragment recognizing the epidermal growth factor receptor (EGFR) fused to CD3e or CD3d appeared to confer a 4-fold increase in the percentage of GFP expressing cells compared with CD19 (Table 5 rows 2 and 3 respectively), although we note that a second measurement of the CD3d fusion showed a much lower percentage of GFP expression (Table 5 row 15). The natural Survivin gene appeared to confer a 3-fold increase in GFP expression compared with CD19 (Table 5 rows 4 and 5). Two ESRs are also shown. The first, comprising an anti-CD28 antibody (with sequence SEQ ID NO: 340) fused to the CD28 transmembrane domain (with sequence SEQ ID NO: 395) and the CD28 intracellular domain comprising the T195P activating mutation (with sequence SEQ ID NO: 352), led to about a 2-fold increase in the number of GFP-expressing cells (Table 5 rows 6 and 7). The second ESR, comprising a TNFRSF1A extracellular domain (with sequence SEQ ID NO: 330) and transmembrane domain (with sequence SEQ ID NO: 394) and the 4-1BB intracellular domain (with sequence SEQ ID NO: 344) resulted in a little less than 2-fold increase in the number of GFP-expressing cells (Table 5 rows 8 and 9). Two co-transfections were particularly active in increasing the percentage of cells expressing GFP. One co-transfection, shown in Table 5 row 16, comprised a first gene encoding an ESR (also described in Section 5.3.2.1) comprising the extracellular domain and transmembrane domain of the Fas receptor (TNFRSF6) (with sequences SEQ ID NOs: 323 and 387 respectively) and the intracellular domain of 4-1BB (TNFRSF9) (with sequence SEQ ID NO: 344), and a second gene encoding a dominant negative mutant of caspase 7 (with sequence SEQ ID NO: 262). The second co-transfection, shown in Table 5 row 17, comprised a first gene encoding STA3-Y640F (with sequence SEQ ID NO: 246) and a second gene encoding PIK3CA-L1001P (with sequence SEQ ID NO: 257). These co-transfections resulted in 51% and 46% respectively of cells expressing GFP after 24 days.

[0152] We conclude that expression of CD28-D124E-T195P, or co-expression of ESR Fas/4-1BB plus Casp7-DN, or co-expression of STAT3-Y640F plus PIK3CA-L1001P in T-cells provides them with a survival or proliferation advantage, and that these genes or gene combinations are immune cell survival-enhancing genes and an immune cell proliferation-enhancing genes as described in Section 5.3.1.1.

### Survivin and Activating Mutants of CD28 Enhance T-Cell Function

[0153] We found expression of Survivin or the D124E/T195P activated double mutant of CD28 to enhance T-cell growth/survival and/or proliferation, as shown in Section 6.2.1.2 and Table 5. To test whether these genes could also enhance T-cell performance we integrated them into the genomes of T-cells together with a chimeric antigen receptor targeting CD19, an epitope naturally found exclusively on B-cells, and tested the ability of the modified T-cells to kill cells of a transformed B-cell line.

[0154] Three gene transfer polynucleotides were constructed: each comprised a GFP reporter (sequence SEQ ID NO: 222) comprising a gene encoding DasherGFP operably linked to a glyceraldehyde-3-phosphate dehydrogenase (GAPDH) promoter and a bovine growth hormone (BGH) polyadenylation signal sequence. The GFP gene was flanked on one side by an HS4 insulator (sequence SEQ ID NO: 92), and on the other by a D4Z4 insulator (sequence SEQ ID NO: 88). The gene transfer polynucleotide further comprised, on the distal side of one insulator, a target sequence 5′-TTAA-3′, immediately followed by a piggyBac-like transposon inverted terminal repeat sequence SEQ ID NO: 10 (which is an embodiment of SEQ ID NO: 6), immediately followed by additional transposon end sequences with SEQ ID NO: 3 (which is >95% identical to SEQ ID NO: 1). The gene transfer polynucleotide further comprised, on the distal side of the other insulator, additional transposon end sequences with SEQ ID NO: 5 (which is >95% identical to SEQ ID NO: 4), immediately followed by a piggyBac-like transposon inverted terminal repeat sequence SEQ ID NO: 11 (which is an embodiment of SEQ ID NO: 7) immediately followed by a target sequence 5′-TTAA-3′. The gene transfer polynucleotide further comprised a gene encoding a CD10-binding chimeric antigen receptor, a polypeptide with sequence given by SEQ ID NO: 229, operably linked to either a PGK promoter or a GAPDH promoter: promoters that appear comparably active in T-cells as described in Section 6.1.2 and shown in Table 3. The chimeric antigen receptor gene was present in the gene transfer polynucleotide such that it was transcribed divergently from the Dasher GFP gene, and such that it was in the part of the gene transfer polynucleotide that was transposable by the transposase. The first gene transfer polynucleotide (346463 with sequence given by SEQ ID NO: 225 comprised no additional transposable genes. The second gene transfer polynucleotide (346776 with sequence given by SEQ ID NO: 226) further comprised an open reading frame encoding Survivin operably linked to a PGK promoter, transcribed in the same direction as the chimeric antigen receptor and also in the part of the gene transfer polynucleotide that was transposable by the transposase. The third gene transfer polynucleotide (346777 with sequence given by SEQ ID NO: 227) comprised the chimeric antigen receptor and further comprised an open reading frame encoding CD28-D124E-T195P operably linked to a PGK promoter, transcribed in the same direction as the chimeric antigen receptor and also in the part of the gene transfer polynucleotide that was transposable by the transposase.

### Survivin and Activated CD28-Enhanced Ex Vivo CAR Cell Killing Test 1

[0155] T-cells were prepared from peripheral blood mononuclear cells (PBMCs) from two different normal donors using the EasySep Human CD8 positive selection kit from Stemcell Technologies according the manufacturer's instructions. T-cells were stimulated for 2-3 days by incubation with irradiated feeder cells to provide secreted CD3, CD28, IL-2, IL-7 and IL-15. Approximately 200,000 T-cells were transfected with 1 μg of transposon DNA and 100 ng mRNA encoding transposase with SEQ ID NO: 37 using a Neon electroporator according to the manufacturer's protocol. Transfected T-cells were mixed with feeder cells and incubated at 37° C. Cells were grown in culture for approximately 5 weeks, at which time around 10% of the cells transfected with each gene transfer polynucleotide were expressing GFP. A sample of the T-cells (200,000) were then mixed with an equal number of JY cells: JY is an Epstein-Barr virus-immortalized B-cell lymphoblastoid line that expresses CD19 and is thus a target for the anti-CD19 chimeric antigen receptor. Samples of cells were taken from the cell mixture 3 and 7 days post-mixing, stained with anti-CD8 and anti-CD19 antibodies (to label the T-cells and JY cells respectively). The results are shown in FIG. 3 and Table 6. By the third day post-mixing, T-cells expressing the chimeric antigen receptor alone had largely disappeared, having been overwhelmed by the JY tumor cells: only 8% of the detectable cells were expressing CD8, while 89% were expressing CD19 (FIG. 3 panel A, Table 6 column A rows 3 and 4). By 7 days post-mixing, only 2.3% of the cells were T-cells expressing CD8 (FIG. 3 panel D, Table 6 column A rows 5 and 6). In contrast, T-cells expressing the chimeric receptor plus either Survivin or CD28-D124E-T195P were able to survive in the presence of the JY-tumor cells. After 3 days, 40-50% of the cells were expressing CD8 (the T-cell marker) and only 23-29% were expressing CD19 (the tumor cell marker), as shown in FIG. 3 panels B and C and Table 6 columns B and C, rows 3 and 4. By day 7, the tumor cells had been effectively eliminated, with approximately 90% of all cells expressing CD8 (FIG. 3 panels E and F and Table 6 columns B and C, rows 5 and 6). We conclude that expression of Survivin or the D124E/T195P activated double mutant of CD28 not only enhance T-cell growth/survival and/or proliferation, they can also enhance T-cell performance by enabling T-cells to survive in the presence of tumor cells and remain active to kill the tumor cells.

### Survivin and Activated CD28-Enhanced In Vivo CAR Cell Killing

[0156] A second sample of the transfected T-cells were sorted using FACS to select cells expressing GFP (which was an indicator of the presence in the T-cell genome of the transposon). The selected cells were grown in culture for a further week and tested for their ability to kill JY tumor cells in vivo. One million JY cells were administered by intraperitoneal injection to NSG immunocompromised mice. Seven days later, one million GFP-expressing T-cells were administered by intraperitoneal injection to the JY-treated mice. Two mice received an inactive control treatment of phosphate buffered saline (PBS) in place of the T-cells. As shown in Table 7, mice that received the PBS survived for 24 or 25 days after the JY cell injection (Table 7 rows 1 and 2). Administration of T-cells expressing the chimeric antigen receptor extended survival for 5-6 days to 30 days post-JY injection (Table 7 row 3). Administration of T-cells expressing the chimeric antigen receptor plus Survivin or CD28-D124E-T195P extended survival for an additional 4 days to 34 days post-JY injection (Table 7 rows 4 and 5). We conclude that expression of Survivin or the D124E/T195P activated double mutant of CD28 not only enhance T-cell growth/survival and/or proliferation ex-vivo, they can also enhance T-cell performance in vivo by enabling T-cells to survive in the presence of tumor cells and remain active to kill the tumor cells.

### Survivin and Activated CD28-Enhanced Ex Vivo CAR Cell Killing Test 2

[0157] We also performed a tumor re-challenge test on T-cells expressing either the anti-CD19 chimeric antigen receptor alone, or the chimeric antigen receptor co-expressed with Survivin or CD28-D124E-T195P. The standard single challenge ex-vivo tumor-lysis assay often over-estimates the true antitumor potential of T-cells due to the relatively short co-culture time and high T-cell to tumor ratio. To determine whether survival-enhancing genes (in this case Survivin and CD28-D124E-T195P) can also enhance T-cell function, we used a recursive high tumor cell load challenge to better mimic the surrounding tumor microenvironment challenging the survival of the T-cells. T-cells (100,000) were challenged with either 1, 2, 3, 4 or 5 consecutive doses of 100,000 NALM6 (which is CD19+, CD20-, CD21-) cells, in a microtiter plate well with a total volume of 200 μl. Each 100,000 cell NALM6 dose was spaced 48 hours apart. For each re-challenge, 100 μl of supernatant was withdrawn, and 100 μl of fresh media containing 100,000 NALM6 cells was added. Twenty-four hours after the last challenge for a sample, NALM6 cell death was measured as a reduction in bioluminescence (see for example Karimi et. al., (2014) Measuring Cytotoxicity by Bioluminescence Imaging Outperforms the Standard Chromium-51 Release Assay. PLoS ONE 9(2): e89357), by addition of D-luciferin and measuring luminescence using a BioTek synergy Neo2 hybrid microplate reader according to the manufacturer's instructions.

[0158] Cells transfected with transposons comprising an anti-CD19 CAR and optionally a gene encoding Survivin or a gene encoding activating mutations in CD28, as described in Section 6.2.1.3a, were cultured ex-vivo for 10 months. By this time the cells were >95% GFP-expressing (and by inference also expressing the CAR and, where present, the survival-enhancing genes. It is unusual for T-cells to survive in ex-vivo culture for 10 months. For T-cells expressing the survival genes, we attribute this longevity to expression of Survivin or CD28-D124E-T195P. However, we also observe this long-term survival of T-cells expressing the chimeric antigen receptor alone, although they grew more slowly than the cells also expressing a survival gene. We attribute this to expression of optimal CAR levels when a gene encoding a chimeric antigen receptor is operably linked to a PGK promoter or a GAPDH promoter or a promoter that drives a comparable expression level. In case prolonged ex-vivo culturing had compromised the ability to T-cells to kill tumor cells, we repeated the transfection described in Section 6.2.1.3a into T-cells from a different donor, and cultured the cells ex-vivo for 4 months before testing them with the tumor re-challenge assay. NALM6 cell death results are shown in Table 8.

[0159] Table 8 row 1 shows the number of times T-cells were challenged with NALM6 cells. Table 8 rows 2-4 show the NALM6 killing by T-cell populations expressing an anti-CD19 chimeric antigen receptor that were grown ex-vivo for 10 months. T-cells were also expressing either Survivin (row 3) or CD28-D124E-T195P (row 4). Cells expressing the chimeric antigen receptor alone killed 100% of NALM6 cells on the first challenge, but the killing efficiency fell on subsequent challenges: 85% after the second challenge, 47% after the third, 23% after the fourth and only 10% of NALM6 cells were killed after the fifth challenge (see Table 8 row 2). In contrast cells that also expressed Survivin were able to kill 76% of NALM6 cells at the fifth challenge (Table 8 row 3) and cells that also expressed CD28-D124E-T195P were able to kill 82% of NALM6 cells at the fifth challenge (Table 8 row 4). A similar pattern of killing was seen in cells that had been cultured ex-vivo for only 4 months, although the efficiency of killing was generally higher (Table 8 rows 5-7). Cells expressing the chimeric antigen receptor alone killed 100% of NALM6 cells on the first and second challenges, but the killing efficiency fell on subsequent challenges: 51% after the third, 28% after the fourth and 27% of NALM6 cells were killed after the fifth challenge (see Table 8 row 5). In contrast cells that also expressed Survivin were able to kill 90% of NALM6 cells at the fifth challenge (Table 8 row 6) and cells that also expressed CD28-D124E-T195P were able to kill 91% of NALM6 cells at the fifth challenge (Table 8 row 7).

[0160] This shows that expression of Survivin or CD28-D124E-T195P by T-cells expressing a chimeric antigen receptor enhances the targeted cell killing by those cells and reduces the rate at which the cells become exhausted. An advantageous T-cell for killing tumor cells comprises a heterologous polynucleotide comprising an expressible Survivin or CD28-D124E-T195P gene.

### Expression of Bcl2 and Bcl6 in Primary T-Cells

[0161] An open reading frame encoding Bcl2 and Bcl6 separated by a viral CHYSL (2A) sequence (the sequence of the full open reading frame Bcl2-2A-Bcl6 is given as SEQ ID NO: 272) was operably linked to a PGK promoter with sequence given by SEQ ID NO: 115 and a rabbit globin polyadenylation signal with sequence SEQ ID NO: 182 and cloned into a gene transfer polynucleotide. The gene transfer polynucleotide further comprised a GFP reporter (sequence SEQ ID NO: 222) comprising a gene encoding DasherGFP operably linked to a glyceraldehyde-3-phosphate dehydrogenase (GAPDH) promoter and a bovine growth hormone (BGH) polyadenylation signal sequence. The two open reading frames were configured to be divergently transcribed (i.e. the two promoters were adjacent to each other and transcribed in opposite directions). The two open reading frames were flanked on one side by an HS4 insulator (sequence SEQ ID NO: 92), and on the other by a D4Z4 insulator (sequence SEQ ID NO: 88). The gene transfer polynucleotide further comprised, on the distal side of one insulator, a target sequence 5′-TTAA-3′, immediately followed by a piggyBac-like transposon inverted terminal repeat sequence SEQ ID NO: 10 (which is an embodiment of SEQ ID NO: 6), immediately followed by additional transposon end sequences with SEQ ID NO: 3 (which is >95% identical to SEQ ID NO: 1). The gene transfer polynucleotide further comprised, on the distal side of the other insulator, additional transposon end sequences with SEQ ID NO: 5 (which is >95% identical to SEQ ID NO: 4), immediately followed by a piggyBac-like transposon inverted terminal repeat sequence SEQ ID NO: 11 (which is an embodiment of SEQ ID NO: 7) immediately followed by a target sequence 5′-TTAA-3′.

[0162] T-cells were prepared from normal donor peripheral blood mononuclear cells (PBMCs) using the EasySep Human CD8 positive selection kit from Stemcell Technologies according the manufacturer's instructions. T-cells were stimulated for 2-3 days by incubation with irradiated feeder cells to provide secreted CD3, CD28, IL-2, IL-7 and IL-15. Approximately 100,000 T-cells were transfected with 1 μg transposon DNA and 100 ng mRNA encoding transposase with sequence SEQ ID NO: 37 using a Neon electroporator according to the manufacturer's protocol. Transfected T-cells were mixed with feeder cells and incubated at 37° C. Samples were taken at various times post-transfection, incubated with a fluorescently-labelled anti-CD8 antibody, and analyzed on a fluorescence-activated cell sorter (FACS) for CD8 and Dasher GFP.

[0163] FIG. 4 shows the distribution of cell staining over time. CD8 staining is used as a marker for CD8+ T-cells, and is shown on the y-axis of each of the FACS plots shown in Panel A. GFP fluorescence is shown on the x-axis of each FACS plot; GFP fluorescence indicates that the cell is expressing GFP, it is also used here as a marker to indicate the presence of the gene transfer polynucleotide within the cell. Panel B is a graph showing the percentage of CD8-expressing T-cells that were also expressing GFP. On the first day post-transfection, approximately 26% of CD8-expressing cells were also expressing GFP. By day 10, 88.7% of the cells showed strong CD8-staining but no GFP expression, 11.3% of the CD8-expressing cells also expressed GFP, indicating that they also contained the gene transfer polynucleotide. The fraction of CD8-expressing cells also exhibiting GFP fluorescence increased over time: 29.4% at day 19, 80% at day 42. The increase in the fraction of the T-cell population expressing GFP either indicates that the T-cells whose genomes comprise the gene transfer polynucleotide possess a survival advantage compared with the T-cells whose genomes do not comprise the gene transfer polynucleotide, or it indicates that the T-cells whose genomes comprise the gene transfer polynucleotide possess a proliferation advantage compared with the T-cells whose genomes do not comprise the gene transfer polynucleotide. We conclude that expression of Bcl2 and Bcl6 in T-cells provides them with a survival or proliferation advantage, and that a gene encoding Bcl2 and Bcl6 is an immune cell survival-enhancing gene and an immune cell proliferation-enhancing gene as described in Section 5.3.1.1.

### Expression of T-Cell Transformation Elements and ESRs in Primary T-Cells

[0164] Genes encoding a set of T-cell transformation elements and enhanced signaling receptors were cloned individually into separate gene transfer polynucleotides. In each case the gene was operably linked to a PGK promoter with sequence given by SEQ ID NO: 115 and a rabbit globin polyadenylation signal with sequence SEQ ID NO: 182. The gene transfer polynucleotide further comprised a GFP reporter (sequence SEQ ID NO: 222) comprising a gene encoding DasherGFP operably linked to a glyceraldehyde-3-phosphate dehydrogenase (GAPDH) promoter and a bovine growth hormone (BGH) polyadenylation signal sequence. The two open reading frames were configured to be divergently transcribed (i.e. the two promoters were adjacent to each other and transcribed in opposite directions). The two open reading frames were flanked on one side by an HS4 insulator (sequence SEQ ID NO: 92), and on the other by a D4Z4 insulator (sequence SEQ ID NO: 88). The gene transfer polynucleotide further comprised, on the distal side of one insulator, a target sequence 5′-TTAA-3′, immediately followed by a piggyBac-like transposon inverted terminal repeat sequence SEQ ID NO: 10 (which is an embodiment of SEQ ID NO: 6), immediately followed by additional transposon end sequences SEQ ID NO: 3 (which is >95% identical to SEQ ID NO: 1). The gene transfer polynucleotide further comprised, on the distal side of the other insulator, additional transposon end sequences SEQ ID NO: 5 (which is >95% identical to SEQ ID NO: 4), immediately followed by a piggyBac-like transposon inverted terminal repeat sequence SEQ ID NO: 11 (which is an embodiment of SEQ ID NO: 7) immediately followed by a target sequence 5′-TTAA-3′.

[0165] T-cells were prepared from the peripheral blood mononuclear cells (PBMCs) of two donors using the EasySep Human CD8 positive selection kit from Stemcell Technologies according to the manufacturer's instructions. T-cells were stimulated for 2-3 days by incubation with irradiated feeder cells to provide secreted CD3, CD28, IL-2, IL-7 and IL-15. Approximately 100,000 T-cells were transfected with 1 μg transposon DNA and 100 ng mRNA encoding transposase with SEQ ID NO: 37 using a Neon electroporator according to the manufacturer's instructions. Transfected T-cells were mixed with feeder cells and incubated at 37° C. Samples were taken at various times post-transfection, incubated with a fluorescently-labelled anti-CD8 antibody, and analyzed on a fluorescence-activated cell sorter (FACS) for CD8 and Dasher GFP. The data is shown in Table 9.

[0166] As described in Section 6.2.1.1, the enrichment of CD8+ cells expressing GFP is an indicator that the gene transfer polynucleotide comprises a gene that confers a survival or a proliferation advantage to a T-cell, as described in Section 5.3.1.1. In this set of gene transfer polynucleotides, HSV-TK was included as a control gene that is expected to have no effect on T-cell survival. We therefore used the percentage of cells expressing GFP in cells transfected with HSV-TK as a level against which to benchmark the putative survival-enhancing genes. As seen in Table 9, two independent transfections of T-cells from 2 donors resulted in initial GFP expression (indicating transfection efficiency) in between 7.5% and 15.3% of cells (Table 9 rows 7 and 8). By day 14 these percentages had fallen significantly, and at subsequent times the percentage of cells expressing GFP remained approximately steady or declined. This indicates that, as expected, HSV-TK does not provide T-cells with a growth or proliferation advantage. In contrast, two of the tested gene transfer polynucleotides comprising genes encoding mutants of STAT3: STAT3-D661Y and STAT3-S614R-Y640F showed a progressive increase in the percentage of cells expressing GFP in both donors (Table 9 rows 1 and 3), indicating that these genes do provide T-cells with a growth or proliferation advantage, similar to that seen for STA3-Y640F in Section 6.2.1.1. We conclude that expression of activating STAT3 mutants including STAT3-D661Y and STA3-S614R-Y640F in T-cells provides them with a survival or proliferation advantage, and that a gene encoding an activating mutant of STAT3 is an immune cell survival-enhancing gene and an immune cell proliferation-enhancing gene as described in Section 5.3.1.1.

[0167] One of the tested gene transfer polynucleotides comprised a gene encoding the inhibitor of apoptosis Bcl-XL. These cells showed a progressive increase in the percentage of cells expressing GFP in both donors (Table 9 row 2), indicating that expression of Bcl-XL provides T-cells with a growth or proliferation advantage, and that a gene encoding Bcl-XL is an immune cell survival-enhancing gene and an immune cell proliferation-enhancing gene as described in Section 5.3.1.1.

[0168] One of the tested gene transfer polynucleotides comprised a gene encoding an activating mutation of phospholipase C: PLCG1-S345F. These cells showed an increase in the percentage of cells expressing GFP in both donors (Table 9 row 6), indicating that expression of PLCG1-S345F provides T-cells with a growth or proliferation advantage, and that a gene encoding PLCG1-S345F is an immune cell survival-enhancing gene and an immune cell proliferation-enhancing gene as described in Section 5.3.1.1.

[0169] Two ESRs were also tested in this experiment. One TNFR1/CD27 (with sequence given by SEQ ID NO: 301) comprised an extracellular domain from TNFRSF1A (with sequence given by SEQ ID NO: 330), a transmembrane domain from TNFRSF1A (with sequence given by SEQ ID NO: 394) and an intracellular domain from CD27 (with sequence given by SEQ ID NO: 343). A second TNFR1/4-1BB (with sequence given by SEQ ID NO: 302) also comprised an extracellular domain from TNFRSF1A (with sequence given by SEQ ID NO: 330) and a transmembrane domain from TNFRSF1A (with sequence given by SEQ ID NO: 394) in this case fused to an intracellular domain from 4-1BB (with sequence given by SEQ ID NO: 344). ESR TNFR1/CD27 and ESR TNFR1/4-1BB both resulted in high percentages of cells expressing GFP in one of the donors (Table 9 row 4) indicating that expression of ESR TNFR1/CD27 or ESR TNFR1/4-1BB can provide T-cells with a growth or proliferation advantage, and that a gene encoding ESR TNFR1/CD27 or ESR TNFR1/4-1BB is an immune cell survival-enhancing gene and an immune cell proliferation-enhancing gene as described in Section 5.3.1.1.

### Effect of Bel-XL on Tumor Cell Killing by Primary T-Cells

### Bcl-XL-Enhanced Ex Vivo BiTE Cell Killing Test

[0170] A gene encoding Bcl-XL (with polypeptide sequence given by SEQ ID NO: 238) was cloned into a gene transfer polynucleotide. The gene was operably linked to a PGK promoter with sequence given by SEQ ID NO: 115 and a rabbit globin polyadenylation signal with sequence SEQ ID NO: 182. The gene transfer polynucleotide further comprised a GFP reporter (sequence SEQ ID NO: 222) comprising a gene encoding DasherGFP operably linked to a glyceraldehyde-3-phosphate dehydrogenase (GAPDH) promoter and a bovine growth hormone (BGH) polyadenylation signal sequence. The two open reading frames were configured to be divergently transcribed (i.e. the two promoters were adjacent to each other and transcribed in opposite directions). The two open reading frames were flanked on one side by an HS4 insulator (with sequence SEQ ID NO: 92), and on the other by a D4Z4 insulator (with sequence SEQ ID NO: 88). The gene transfer polynucleotide further comprised, on the distal side of one insulator, a target sequence 5′-TTAA-3′, immediately followed by a piggyBac-like transposon inverted terminal repeat sequence SEQ ID NO: 10 (which is an embodiment of SEQ ID NO: 6), immediately followed by additional transposon end sequences SEQ ID NO: 3 (which is >95% identical to SEQ ID NO: 1). The gene transfer polynucleotide further comprised, on the distal side of the other insulator, additional transposon end sequences SEQ ID NO: 5 (which is >95% identical to SEQ ID NO: 4), immediately followed by a piggyBac-like transposon inverted terminal repeat sequence SEQ ID NO: 11 (which is an embodiment of SEQ ID NO: 7) immediately followed by a target sequence 5′-TTAA-3′.

[0171] T-cells were prepared from the peripheral blood mononuclear cells (PBMCs) of three donors using the EasySep Human CD8 positive selection kit from Stemcell Technologies according the manufacturer's instructions. T-cells were stimulated for 2-3 days by incubation with irradiated feeder cells to provide secreted CD3, CD28, IL-2, IL-7 and IL-15. Approximately 100,000 T-cells were transfected with 1 μg transposon DNA and 100 ng mRNA encoding transposase with SEQ ID NO: 37 using a Neon electroporator according to the manufacturer's protocol. Transfected T-cells were mixed with feeder cells and incubated at 37° C.

[0172] Cells were grown in culture in T-cell media for 240 days. As described in Section 6.2.1.6, and in Table 9, Bcl-XL provides a selective advantage to T-cells. That we were able to culture these cells for 8 months demonstrates that the expression of the Bcl-XL gene in T-cells enhances their survival ex-vivo. In addition to survival, we tested whether these T-cells retained their cytotoxicity by mixing them with a tumor cell line. Prior to testing cytotoxicity, we determined the fraction of cells expressing Bcl_X1 by measuring GFP which is expressed from the same transposon integrated into the T-cell genome. FIG. 5 shows flow cytometry analysis of the T-cells from the three different donors 240 days after they were transfected, with GFP on the x-axis and staining for the T-cell marker CD8 on the y-axis. Panel A shows that over 90% of T-cells from Donor 81 expressed GFP, Panel B B shows that over 99% of T-cells from Donor 82 expressed GFP, Panel C shows that over 98% of T-cells from Donor 84 expressed GFP. Thus after 240 days the great majority of T-cells from each of the donors were expressing GFP, and by inference Bcl-XL.

[0173] To measure cytotoxicity, we mixed 100,000 T-cells with 100,000 cells of a B-cell tumor line, NALM6 (which is CD19+, CD20-, CD21-) containing a genomically integrated gene encoding luciferase. A Bi-specific T-cell engager (BiTE) with binding domains against CD3 (on the T-cell surface) and CD19 (on the NALM6 surface) was included in some reactions to bring the T-cell to the tumor target cell. The following day we used a bioluminescence assay (see for example Karimi et. al., (2014) Measuring Cytotoxicity by Bioluminescence Imaging Outperforms the Standard Chromium-51 Release Assay. PLoS ONE 9(2): e89357) to determine the fraction of NALM6 cells that had been lysed.

[0174] The cytotoxicity test was performed as a tumor re-challenge. The standard single challenge ex-vivo tumor-lysis assay often over-estimates the true antitumor potential of T-cells due to the relatively short co-culture time and high T-cell to tumor ratio. To determine whether a survival-enhancing gene (in this case Bcl-XL) can also enhance T-cell function, we used a recursive high tumor cell load challenge to better mimic the surrounding tumor microenvironment challenging the survival of the T-cells. T-cells (100,000) were challenged with either 1, 2, 3, 4 or 5 consecutive doses of 100,000 NALM6 cells, in a microtiter plate well with a total volume of 200 μl. Each 100,000 cell NALM6 dose was spaced 48 hours apart. For each re-challenge, 100 μl of supernatant was withdrawn, and 100 μl of fresh media containing 100,000 NALM6 cells was added. Twenty-four hours after the last challenge for a sample, NALM6 cell death was measured as a reduction in bioluminescence, by addition of D-luciferin and measuring luminescence using a BioTek synergy Neo2 hybrid microplate reader according to the manufacturer's instructions. NALM6 cell death results are shown in Table 10.

[0175] Table 10 row 1 shows the number of times T-cells were challenged with NALM6 cells. Table 10 rows 2-5 show the NALM6 killing by four different T-cell populations in the absence of any BiTE. Cell killing under these conditions reflects general allogenic killing, there is no specific targeting to a tumor antigen. The killing achieved by the three T-cell populations expressing Bcl-XL (Table 10, rows 2-4) was very comparable to the killing achieved by naïve T-cells (Table 10 row 5). Of note is the fact that the naïve T-cells were cultured for only a few weeks prior to their use in this experiment, in contrast to the Bcl-XL-expressing T-cells which had been cultured for 8 months. This shows that Bcl-XL expression can allow T-cells to grow in culture for 8 months while retaining their cytotoxicity.

[0176] A second set of challenges were performed in the presence of a BiTE which targets the CD19 antigen on the surface of the NALM6 cells. Table 10 row 9 shows the NALM6 killing effected by naïve T-cells in the presence of the BiTE. Killing after the first and second challenge was much more efficient than without the BiTE: 88% of NALM6 cells were killed on the first challenge, and 97% were killed after the second challenge. The efficiency of killing then decreased: 72% of the NALM6 cells were killed after the third challenge, 62% after the fourth challenge and 59% after the fifth challenge. This decrease is emblematic of loss of T-cell efficacy seen after long-term tumor re-challenge (see for example Voss et., al. (2017) Cancer Lett. 408: 190-196. “Metabolic reprogramming and apoptosis sensitivity: defining the contours of a T cell response”). The three T-cell populations expressing Bcl-XL were as effective at killing NALM6 after 1 or 2 challenges in the presence of the BiTE as were the naïve T-cells (Table 10 rows 6-8). Unlike naïve T-cells, the NALM6-killing efficiency of Bcl-XL-expressing T-cells did not decrease upon successive challenges. After the fifth challenge, two of the Bcl-XL-expressing T-cell populations (from donors 81 and 84) killed 95% of the NALM6 cells (Table 10 rows 6 and 8), and the third population (from donor 82) killed 94% of the NALM6 cells (Table 10 row 7), compared with 59% killing for the naïve T-cells. This shows that not only are T-cells expressing Bcl-XL that have been grown ex-vivo for 8 months still as capable of killing tumor cells as are naïve T-cells that have only been cultured for a few weeks; they also appear to be less susceptible to factors that reduce T-cell efficacy after repeated exposure to tumor antigen.

### Bcl-XL-Enhanced Ex Vivo CAR Cell Killing Test

[0177] We performed a tumor re-challenge test on T-cells expressing the anti-CD19 chimeric antigen receptor as described in Section 6.2.1.3c. Transposons were as described in Section 6.2.1.3 comprising the chimeric antigen receptor co-expressed with Survivin or CD28-D124E-T195P, and an additional transposon was made that comprised the chimeric antigen receptor co-expressed with Bcl-XL. To determine whether survival-enhancing genes (in this case Survivin, CD28-D124E-T195P and Bcl-XL) can also enhance T-cell function, we used a recursive high tumor cell load challenge to better mimic the surrounding tumor microenvironment challenging the survival of the T-cells. T-cells (100,000) were challenged with either 1, 2, 3, 4, 5 or 6 consecutive doses of 100,000 NALM6 (which is CD19+, CD20-, CD21-) cells, in a microtiter plate well with a total volume of 200 μl. Each 100,000 cell NALM6 dose was spaced 48 hours apart. For each re-challenge, 100 μl of supernatant was withdrawn, and 100 μl of fresh media containing 100,000 NALM6 cells was added. Twenty-four hours after the last challenge for a sample, NALM6 cell death was measured as a reduction in bioluminescence (see for example Karimi et. al., (2014) Measuring Cytotoxicity by Bioluminescence Imaging Outperforms the Standard Chromium-51 Release Assay, PLoS ONE 9(2): e89357), by addition of D-luciferin and measuring luminescence using a BioTek synergy Neo2 hybrid microplate reader according to the manufacturer's instructions.

[0178] Cells transfected with transposons comprising an anti-CD19 CAR and optionally a gene encoding Survivin or a gene encoding activating mutations in CD28, or a gene encoding Bcl-XL, were cultured ex-vivo for 4 months. By this time the cells were >95% GFP-expressing (and by inference also expressing the CAR and, where present, the survival-enhancing genes. NALM6 cell death results are shown in Table 11.

[0179] Table 11 row 1 shows the number of times T-cells were challenged with NALM6 cells. Table 11 row 2 shows the NALM6 killing by T-cell populations expressing an anti-CD19 chimeric antigen receptor. T-cells were also expressing either Survivin (row 3), CD28-D124E-T195P (row 4), or Bcl-XL (row 5). Cells with no chimeric antigen receptor are shown in row 6. Cells expressing the chimeric antigen receptor alone killed 70% of NALM6 cells on the first challenge, the killing efficiency rose to 97% on the second challenge, but then fell again on subsequent challenges: 69% after the third challenge, 59% after the fourth, 58% on the fifth and 53% of NALM6 cells were killed after the sixth challenge (see Table 11 row 2). In contrast, cells that also expressed Survivin were able to kill 85% of NALM6 cells at the sixth challenge (Table 11 row 3); cells that also expressed CD28-D124E-T195P were able to kill 85% of NALM6 cells at the sixth challenge (Table 11 row 4) and cells that also expressed Bcl-XL were able to kill 94% of NALM6 cells at the sixth challenge (Table 11 row 5). This shows that expression of Survivin or CD28-D124E-T195P or Bcl-XL by T-cells expressing a chimeric antigen receptor enhances the targeted cell killing by those cells and reduces the rate at which the cells become unable to kill tumor cells. An advantageous T-cell for killing tumor cells comprises a gene encoding a chimeric antigen receptor and a heterologous polynucleotide comprising an expressible Survivin or CD28-D124E-T195P or Bcl-XL gene.

[0180] Inhibitors of apoptosis Survivin, Bcl-XL, Bcl2 and Bcl6 are all shown here to act as immune cell survival genes. Dominant negative gene in the caspase pathway for example a dominant negative mutant of Caspase 3, Caspase 7, Caspase 8, Caspase 9, Caspase 10 or CASP8 and FADD-like apoptosis regulator (CFLAR) are anticipated to have similar effects. In some embodiments of the invention, an immune cell comprises a gene encoding a dominant negative inhibitor of the apoptotic pathway comprising a dominant negative mutant of a sequence selected from among SEQ ID NO: 240-245; in some embodiments the inhibitor of the apoptotic pathway comprises a sequence selected from among SEQ ID NO: 237, 238 or 261-272.

### Enhanced Signaling Receptors

[0181] Anti-CD28/OX40 is an ESR with Proliferation-Enhancing Activity

[0182] A gene was designed to encode an anti-CD28/OX40 ESR (with sequence given by SEQ ID NO: 307) comprising anti-CD28 antibody TGN1412 (with sequence given by SEQ ID NO: 340) fused to the transmembrane domain for TNFRSF4 (OX40) (with sequence given by SEQ ID NO: 373) and the intracellular domain for TNFRSF4 (OX40) (with sequence given by SEQ ID NO: 341). The gene was operably linked to a PGK promoter with sequence given by SEQ ID NO: 115 and a rabbit globin polyadenylation signal sequence with SEQ ID NO: 182. The gene transfer polynucleotide further comprised a GFP reporter (with sequence SEQ ID NO: 222) comprising a gene encoding DasherGFP operably linked to a glyceraldehyde-3-phosphate dehydrogenase (GAPDH) promoter and a bovine growth hormone (BGH) polyadenylation signal sequence. The two open reading frames were configured to be divergently transcribed (the two promoters were adjacent to each other and transcribed in opposite directions). The two open reading frames were flanked on one side by an HS4 insulator (with sequence SEQ ID NO: 92), and on the other by a D4Z4 insulator (with sequence SEQ ID NO: 88). The gene transfer polynucleotide further comprised, on the distal side of one insulator, a target sequence 5′-TTAA-3′, immediately followed by a piggyBac-like transposon inverted terminal repeat sequence SEQ ID NO: 10 (which is an embodiment of SEQ ID NO: 6), immediately followed by additional transposon end sequences SEQ ID NO: 3 (which is >95% identical to SEQ ID NO: 1). The gene transfer polynucleotide further comprised, on the distal side of the other insulator, additional transposon end sequences SEQ ID NO: 5 (which is >95% identical to SEQ ID NO: 4), immediately followed by a piggyBac-like transposon inverted terminal repeat sequence SEQ ID NO: 11 (which is an embodiment of SEQ ID NO: 7) immediately followed by a target sequence 5′-TTAA-3′.

[0183] T-cells were prepared from peripheral blood mononuclear cells (PBMCs) from two different normal donors using the EasySep Human CD8 positive selection kit from Stemcell Technologies according to the manufacturer's instructions. T-cells were stimulated for 2-3 days by incubation with irradiated feeder cells to provide secreted CD3, CD28, IL-2, IL-7 and IL-15. Approximately 100,000 T-cells were transfected with 1 μg transposon DNA and 100 ng mRNA encoding transposase with sequence given by SEQ ID NO: 37 using a Neon electroporator according to the manufacturer's protocol. Transfected T-cells were mixed with feeder cells and incubated at 37° C. Samples were taken at 1, 14 and 28 days post-transfection, incubated with a fluorescently-labelled anti-CD8 antibody, and analyzed on a fluorescence-activated cell sorter (FACS) for CD8 and Dasher GFP. The data is shown in Table 12.

[0184] As described in Section 6.2.1.1, the enrichment of CD8+ cells expressing GFP is an indicator that the gene transfer polynucleotide comprises a gene that confers a survival or a proliferation advantage to a T-cell, as described in Section 5.3.1.1. T-cells transfected with the anti-CD28/OX40 ESR gene showed extremely rapid accumulation of GFP. In cells from one donor 94% of CD8+ cells were GFP+ within 14 days. In cells from a second donor, 98% of cells were GFP+ within 28 days. In contrast cells transfected with a control gene, HSV-TK showed comparable initial (day 1) GFP levels, but these levels decreased rather than the GFP expressing cells becoming enriched. This data indicates that expression of the anti-CD28/OX40 ESR provided a very significant growth/proliferation advantage to T-cells that express the ESR.

### ESR FAS/4-1BB Stimulates Proliferation in the Presence of Casp7-DN

[0185] A gene was designed to encode an ESR comprising the extracellular domain of TNFRSF6 (Fas) (with sequence given by SEQ ID NO: 323), and further comprising the transmembrane domain of TNFRSF6 (Fas) (with sequence given by SEQ ID NO: 387) and further comprising the intracellular domain of TNFRSF9 (4-1BB) (with sequence given by SEQ ID NO: 344). This ESR (Fas/4-1BB) comprised sequence SEQ ID NO: 274. A second gene encoding an inhibitor of apoptosis: a dominant negative version of Casp7: Casp7-DN (with sequence given by SEQ ID NO: 262) was also designed.

[0186] The ESR and Casp7-DN were separately cloned into a transposon-based gene transfer vector. Each gene was operably linked to a PGK promoter with sequence given by SEQ ID NO: 115 and a rabbit globin polyadenylation signal sequence with sequence given by SEQ ID NO: 182. Each gene transfer polynucleotide further comprised a GFP reporter (with sequence SEQ ID NO: 222) comprising a gene encoding DasherGFP operably linked to a glyceraldehyde-3-phosphate dehydrogenase (GAPDH) promoter and a bovine growth hormone (BGH) polyadenylation signal sequence. The two open reading frames were configured to be divergently transcribed (the two promoters were adjacent to each other and transcribed in opposite directions). The two open reading frames were flanked on one side by an HS4 insulator (with sequence SEQ ID NO: 92), and on the other by a D4Z4 insulator (with sequence SEQ ID NO: 88). The gene transfer polynucleotide further comprised, on the distal side of one insulator, a target sequence 5′-TTAA-3′, immediately followed by a piggyBac-like transposon inverted terminal repeat sequence SEQ ID NO: 10 (which is an embodiment of SEQ ID NO: 6), immediately followed by additional transposon end sequences SEQ ID NO: 3 (which is >95% identical to SEQ ID NO: 1). The gene transfer polynucleotide further comprised, on the distal side of the other insulator, additional transposon end sequences SEQ ID NO: 5 (which is >95% identical to SEQ ID NO: 4), immediately followed by a piggyBac-like transposon inverted terminal repeat sequence SEQ ID NO: 11 (which is an embodiment of SEQ ID NO: 7) immediately followed by a target sequence 5′-TTAA-3′.

[0187] T-cells were prepared from peripheral blood mononuclear cells (PBMCs) from two different normal donors using the EasySep Human CD8 positive selection kit from Stemcell Technologies according to the manufacturer's instructions. T-cells were stimulated for 2-3 days by incubation with irradiated feeder cells to provide secreted CD3, CD28, IL-2, IL-7 and IL-15. Approximately 100,000 T-cells were transfected with 0.5 μg of each transposon DNA and 100 ng mRNA encoding transposase with sequence given by SEQ ID NO: 37 using a Neon electroporator according to the manufacturer's protocol. Transfected T-cells were mixed with feeder cells and incubated at 37° C. Samples were taken at 1, 7, 28, 48 and 54 days post-transfection, incubated with a fluorescently-labelled anti-CD8 antibody, and analyzed on a fluorescence-activated cell sorter (FACS) for CD8 and Dasher GFP. The data is shown in Table 13.

[0188] As described in Section 6.2.1.1, the enrichment of CD8+ cells expressing GFP is an indicator that the gene transfer polynucleotide comprises a gene that confers a survival or a proliferation advantage to a T-cell, as described in Section 5.3.1.1. T-cells co-transfected with genes encoding the ESR FAS/4-1BB plus Casp7-DN gene showed an increase in the percentage of cells expressing GFP over time. One day post-transfection 4.5% of CD8+ cells also expressed GFP. After 7 days, 1.9% of the CD8+ cells were expressing GFP, indicating that less than 2% of the CD8+ T-cells had integrated the gene transfer polynucleotides into their nuclei. By 28 days post-transfection, 31% of CD8+ cells were also expressing GFP, indicating that the genes on the gene transfer polynucleotide were enabling the recipient cells to either survive better or to proliferate more rapidly. By 48 days post-transfection, 50.4% of CD8+ cells were also expressing GFP, and by 54 days post-transfection over 97% of the CD8+ T-cells were also expressing GFP. This data indicates that expression of the ESR FAS/4-1BB plus the anti-apoptotic gene Casp7-DN provided a significant survival/proliferation advantage.

### BRIEF DESCRIPTION OF TABLES

[0189] Table 1. Xenopus and Bombyx piggyBac-Like Transposons in the Human Jurkat T-Cell Line

[0190] Gene transfer polynucleotides with sequence given by SEQ ID NOs: 223 and 224 comprising piggyBac-like transposons were constructed as described in Section 6.1.1. Jurkat cells (200,000 cells per transfection) were transfected with 1 μg of plasmid DNA and 100 ng of transposase mRNA encoding the corresponding transposase, using a Neon electroporator according to the manufacturer's instructions. After various times (shown in column A), cells were labeled with an anti-CD19 antibody and the population of cells were analyzed by FACS to determine the percentage of the cell population expressing CD19. Column B shows the percentage for the Xenopus transposon contained within gene transfer polynucleotide SEQ ID NO: 223; column C shows the percentage for the Bombyx transposon contained within gene transfer polynucleotide with sequence given by SEQ ID NO: 224.

[0191] Table 2. Duration of Heterologous Promoter Activity in Jurkat Cells

[0192] Plasmids comprising the promoter named in column A, with sequence given by the SEQ ID NO shown in column B, and optionally an intron with sequence given by the SEQ ID NO shown in column C, and further comprising a polynucleotide with sequence given by SEQ ID NO: 218 to the 5′ and a polynucleotide with sequence given by SEQ ID NO: 219 to the 3′ of the promoter were transfected into Jurkat cells as described in Section 6.1.2.1. Cells were fluorescently labeled with an anti-CD19 antibody and analyzed by flow cytometry at various times after transfection. The percentage of cells expressing CD19 on their surfaces are shown after 2 days (column D), 8 days (column E), 16 days (column F) and 23 days (column G). Column H shows the percentage decline in CD19-expressing cells between day 2 and day 23. The same promoters and introns were also operably linked to a gene encoding GFP and transiently transfected into human embryonic kidney (HEK) cells in triplicate. Cells were counted on a fluorimeter 48 hours post-transfection. The mean fluorescence intensity from the three readings is shown in column I.

[0193] Table 3. Heterologous Promoter Activity in Jurkat Cells

[0194] Plasmids comprising the promoter named in column A, with sequence given by the SEQ ID NO shown in column B, and optionally an intron with sequence given by the SEQ ID NO shown in column C, and further comprising a polynucleotide with sequence given by SEQ ID NO: 218 to the 5′ and a polynucleotide with sequence given by SEQ ID NO: 219 to the 3′ of the promoter were transfected into Jurkat cells as described in Section 6.1.2.1. Eight days later cells were fluorescently labeled with an anti-CD19 antibody and analyzed by flow cytometry. Column D shows the mean fluorescent intensity. Column E shows the calculated average number of CD19 molecules on the surface of the Jurkat cells.

[0195] Table 4. Heterologous Promoter Activity in Primary T-Cells

[0196] Plasmids comprising the promoter named in column A, with sequence given by SEQ ID NO shown in column B, further comprising a polynucleotide with sequence given by SEQ ID NO: 218 to the 5′ and a polynucleotide with sequence given by SEQ ID NO: 219 to the 3′ of the promoter were transfected into primary T-cells as described in Section 6.1.2.2. Eleven days later cells were fluorescently labeled with an anti-CD19 antibody and analyzed by flow cytometry. Column C shows the mean fluorescent intensity.

[0197] Table 5. Enhanced Survival of Primary T-Cells

[0198] Gene transfer polynucleotides comprising piggyBac-like transposons were constructed as described in Section 6.2.1.2. Each transposon comprised one putative survival-enhancing gene. Fifteen samples of human primary T-cells were prepared by co-transfection of 1 μg DNA of a single transposon and 100 ng mRNA encoding transposase with sequence given by SEQ ID NO: 37 (rows 1-15). The name of the gene is given in column A, and the SEQ ID NO of the gene is given in column B. Eight samples of human primary T-cells were prepared by co-transfection of 0.5 μg DNA of two different transposons (differing only in the sequence of the putative survival-enhancing gene) and 100 ng mRNA encoding transposase with sequence given by SEQ ID NO: 37 (rows 16-23). The name of the first gene is given in column A, the SEQ ID NO of the first gene is given in column B, the name of the second gene is given in column C, and the SEQ ID NO of the second gene is given in column D. Cells were cultured for 24 days before being analyzed by FACS for the presence of CD8 as a T-cell marker, and the expression of GFP as an indicator of the presence of the gene transfer polynucleotide in the genome of the T-cell. Column E shows the percentage of analyzed cells that were lymphocytes, column F shows the percentage of analyzed cells that were alive, column G shows the percentage of live cells that expressed CD8 on their surface, and column H shows the percentage of CD8+ cells that were expressing GFP.

[0199] Table 6. Ex-Vivo Anti-Tumor Activity of Primary T-Cells Expressing Survivin and CD28-D124E-T195P

[0200] A gene transfer polynucleotide encoding an anti-CD19 chimeric antigen receptor was constructed on a piggyBac-like transposon as described in Section 6.2.1.3. Human primary T-cells were co-transfected with a transposase and one of three corresponding transposons comprising a gene encoding a chimeric antigen receptor with sequence given by SEQ ID NO: 229 and a GFP reporter as described in Section 6.2.1.3. One transposon comprised no further genes (column A), one transposon further comprised a gene encoding Survivin (column B) and one transposon further comprised a gene encoding CD28-D124E-T195P (column C). Sequences of the gene transfer polynucleotides are given as the SEQ ID NOs shown in row 1. Cells were cultured for approximately 5 weeks, at which point the percentage of the T-cells expressing GFP were measured using FACS (row 2). At that point 200,000 T-cells (˜20,000 GFP-expressing T-cells) were mixed with 200,000 cells of the JY transformed B-cell line. Three days (rows 3 and 4) or 7 days (rows 5 and 6) post-mixing, cells were labelled with fluorescently-labelled anti-CD8 and anti-CD19 antibodies and analyzed using a fluorescence-activated cell sorter. The percentage of cells expressing CD8 is shown in rows 4 and 6, the percentage of cells expressing CD19 is shown in rows 3 and 5.

[0201] Table 7. In Vivo Anti-Tumor Activity of Primary T-Cells Expressing Survivin and CD28-D124E-T195P

[0202] Human primary T-cells were co-transfected with a transposase and one of three corresponding gene transfer polynucleotides comprising transposons constructed as described in Section 6.2.1.3 and Table 6. Names of the transposons are shown in column A, sequences of the gene transfer polynucleotides are given as the SEQ ID NOs shown in column B. Cells were cultured after transfection for approximately 5 weeks, and then sorted using FACS to select cells expressing GFP which was an indicator of the presence in the T-cell genome of the transposon. The selected cells were grown in culture for a further week and then 1 million cells were administered by intraperitoneal injection to mice that had received an intraperitoneal injection of 1 million JY cells 7 days previously. The length of time (in days) that the mice lived after administration of the JY cells is shown in column C. Rows 1 and 2 received no T-cells, but instead control injections of phosphate buffered saline (PBS).

[0203] Table 8. Enhanced Activity of Primary T-Cells Expressing Survivin and CD28-D124E-T195P

[0204] Gene transfer polynucleotides comprising piggyBac-like transposons were constructed and transfected into T-cells from 2 different donors as described in Section 6.2.1.3. Cells from one donor were cultured ex-vivo for 10 months, cells from the second donor were cultured ex-vivo for 4 months. GFP-expressing CD8+ T-cells were sorted by FACS then challenged with a NALM6 B-cell tumor line, as described in Section 6.2.1.3. Column A shows the ex-vivo culture time, column B shows whether the cells were expressing a Survivin gene encoded on a heterologous polynucleotide, column C shows whether the cells were expressing a CD28-D124E-T195P gene encoded on a heterologous polynucleotide. Columns D-H show the % of NALM6 killing observed using a luminescence assay. Column D: cells challenged with NALM6 on day 0 and killing measured on day 1. Column E: cells challenged with NALM6 on day 0 and day 2, killing measured on day 3. Column F: cells challenged with NALM6 on day 0, day 2 and day 4, killing measured on day 5. Column G: cells challenged with NALM6 on day 0, day 2, day 4 and day 6, killing measured on day 7. Column H: cells challenged with NALM6 on day 0, day 2, day 4, day 6 and day 8, killing measured on day 9.

[0205] Table 9. Enhanced Survival of Primary T-Cells

[0206] Gene transfer polynucleotides comprising piggyBac-like transposons were constructed as described in Section 6.2.1.5. Each transposon comprised one putative survival-enhancing gene, ESR gene or control gene. Eight samples of human primary T-cells from donor 1 (columns C-F) and eight samples of human primary T-cells from donor 2 (columns G-J) were prepared by co-transfection of 1 μg DNA of a single transposon and 100 ng mRNA encoding transposase with sequence given by SEQ ID NO: 37. The name of the gene is given in column A, and the SEQ ID NO of the gene is given in column B. Cells were cultured for 42 days, with samples taken at various times post-transfection for analysis by FACS of the presence of CD8 as a T-cell marker, and the expression of GFP as an indicator of the presence of the gene transfer polynucleotide in the genome of the T-cell. Columns C-J show the percentage of analyzed cells expressing CD8 on their surface (i.e. CD8+ T-cells) that were also expressing GFP, 1 day (columns C and G), 14 days (columns D and H), 28 days (columns E and I) and 42 days (columns F and J) post-transfection.

[0207] Table 10. Enhanced Activity of Primary T-Cells Expressing Bcl-XL

[0208] Gene transfer polynucleotides comprising piggyBac-like transposons were constructed and transfected into T-cells from 3 different donors as described in Section 6.2.1.6. After 240 days cells were challenged with a NALM6 B-cell tumor line, as described in Section 6.2.1.6. Column A shows the donor ID, column B shows whether the cells contained a transposon comprising a gene encoding Bcl-XL, column C shows whether the culture also contained a CD3/CD19-binding BiTE. Columns D-H show the % of NALM6 killing observed using a luminescence assay. Column D: cells challenged with NALM6 on day 0 and killing measured on day 1. Column E: cells challenged with NALM6 on day 0 and day 2, killing measured on day 3. Column F: cells challenged with NALM6 on day 0, day 2 and day 4, killing measured on day 5. Column G: cells challenged with NALM6 on day 0, day 2, day 4 and day 6, killing measured on day 7. Column H: cells challenged with NALM6 on day 0, day 2, day 4, day 6 and day 8, killing measured on day 9.

[0209] Table 11. Enhanced Activity of Primary T-Cells Expressing Survivin and CD28-D124E-T195P

[0210] Gene transfer polynucleotides comprising piggyBac-like transposons were constructed and transfected into T-cells as described in Section 6.2.1.6b. GFP-expressing CD8+ T-cells were sorted by FACS then challenged with a NALM6 B-cell tumor line, as described in Section 6.2.1.6b. Column A shows whether the cells were expressing a Survivin gene encoded on a heterologous polynucleotide, column B shows whether the cells were expressing a CD28-D124E-T195P gene encoded on a heterologous polynucleotide, column C shows whether the cells were expressing a Bcl-XL gene encoded on a heterologous polynucleotide. Columns D-I show the % of NALM6 killing observed using a luminescence assay. Column D: cells challenged with NALM6 on day 0 and killing measured on day 1. Column E: cells challenged with NALM6 on day 0 and day 2, killing measured on day 3. Column F: cells challenged with NALM6 on day 0, day 2 and day 4, killing measured on day 5. Column G: cells challenged with NALM6 on day 0, day 2, day 4 and day 6, killing measured on day 7. Column H: cells challenged with NALM6 on day 0, day 2, day 4, day 6 and day 8, killing measured on day 9. Column I: cells challenged with NALM6 on day 0, day 2, day 4, day 6, day 8 and day 10, killing measured on day 11.

[0211] Table 12. Proliferation of Primary T-Cells Stimulated by Anti-CD28/OX40 ESR

[0212] A gene transfer polynucleotide comprising an anti-CD28/OX40 ESR encoded on a piggyBac-like transposon was constructed as described in Section 6.2.2.1. A control transposon comprised the Herpes Simplex virus thymidine kinase (HSV-TK) gene instead of the ESR. Samples of human primary T-cells from two donors were prepared by co-transfection of 1 μg DNA of the transposon and 100 ng mRNA encoding transposase with sequence given by SEQ ID NO: 37. Cells were cultured for the number of days shown in column A before being analyzed by FACS for the presence of CD8 as a T-cell marker, and the expression of GFP as an indicator of the presence of the gene transfer polynucleotide in the genome of the T-cell. The percentage of CD8-expressing cells that also expressed GFP are shown in columns B-E: donor 1 cells transfected with anti-CD28/OX40 ESR (column B), donor 1 cells transfected with HSV-TK (column B), donor 2 cells transfected with anti-CD28/OX40 ESR (column C), donor 2 cells transfected with HSV-TK (column D). ND=not done.

[0213] Table 13. Proliferation of Primary T-Cells Stimulated by ESR FAS/4-1BB Plus Casp7-DN

[0214] A gene transfer polynucleotide encoding an ESR in which the extracellular domain of FAS was fused with the transmembrane and intracellular domains of 4-1BB was constructed on a piggyBac-like transposon as described in Section 6.2.2.2. A second gene transfer polynucleotide encoding a dominant negative inhibitor of apoptosis Casp7-DN was constructed on a second piggyBac-like transposon as described in Section 6.2.2.2. Samples of human primary T-cells from two donors were prepared by co-transfection of 0.5 μg DNA of each transposon and 100 ng mRNA encoding transposase with sequence given by SEQ ID NO: 37. Cells were cultured for the number of days shown in column A before being analyzed by FACS for the presence of CD8 as a T-cell marker, and the expression of GFP as an indicator of the presence of the gene transfer polynucleotide in the genome of the T-cell. Column B shows the percentage of CD8-expressing cells that also expressed GFP.

### TABLES

TABLE 1

| | A | B | C |
|---|---|---|---|
| | Day | Xenopus | Bombyx |
| 1 | 5 | 85 | 84 |
| 2 | 10 | 50 | 42 |
| 3 | 15 | 18 | 27 |
| 4 | 22 | 16 | 25 |
| 5 | 34 | 20 | 30 |
| 6 | 55 | 20 | 35 |

TABLE 2

| | A | B | C | D | E | F | G | H | I |
|---|---|---|---|---|---|---|---|---|---|
| | Promoter name | Promoter SEQ ID NO | Intron SEQ ID NO | day 2 | day 8 | day 16 | day 23 | % decline | HEK |
| 1 | EF1 (Rn) | 94 | 155 | 87 | 62 | 24 | 25 | 0.71 | 14,526 |
| 2 | EEF2 (Rn) | 108 | 157 | 54 | 30 | 32 | 30 | 0.44 | 7,475 |
| 3 | Ubb | 95 | 159 | 59 | 51 | 50 | 48 | 0.19 | 3,241 |
| 4 | GAPDH (Rn) | 98 | 156 | 51 | 48 | 51 | 54 | −0.06 | 4,068 |
| 5 | PGKc | 115 | N/A | 61 | 56 | 56 | 57 | 0.07 | 1,255 |
| 6 | EF1 (Hs) | 132 | 158 | 76 | 37 | 36 | 37 | 0.51 | 13,627 |

TABLE 3

| | A | B | C | D | E |
|---|---|---|---|---|---|
| | Promoter | Promoter | Intron | day 8 | day 8 |
| | name | SEQ ID NO | SEQ ID NO | MFI | CD19/cell |
| 1 | EF1 (Rn) | 94 | 157 | 33,766 | 78,294 |
| 2 | EEF2 (Rn) | 108 | 157 | 18,355 | 42,560 |
| 3 | Ubb | 95 | 159 | 39,927 | 92,579 |
| 4 | GAPDH (Rn) | 98 | 156 | 49,764 | 115,389 |
| 5 | PGKc | 115 | N/A | 38,829 | 90,034 |
| 6 | EF1 (Hs) | 132 | 158 | 48,174 | 111,702 |
| 7 | B cells | N/A | N/A | 9,488 | 22,000 |

TABLE 4

| | A | B | C | D |
|---|---|---|---|---|
| | Promoter | Promoter | day 11 | day 11 |
| | name | SEQ ID NO | MFI | CD19% |
| 1 | GAPDH (Hs) | 97 | 5,975 | 9.1 |
| 2 | GADPH (Rn) | 98 | 7,570 | 8.6 |
| 3 | EEF2(Rn) | 108 | 8,490 | 10.8 |
| 4 | EEF2(Mm) | 109 | 6,936 | 3.3 |
| 5 | D4SV40 | 110 | 2,531 | 2.0 |
| 6 | HSVTK-XPRT | 111 | 4,238 | 7.4 |
| 7 | HSVTK | 112 | 5,400 | 5.1 |
| 8 | MC1 | 113 | 10,528 | 6.4 |
| 9 | EEF2(Mm) + intron | 114 | 10,451 | 4.9 |

TABLE 5

| | | B | | D | E | | G | H |
|---|---|---|---|---|---|---|---|---|
| | A | GENE 1 | C | GENE 2 | lymphocyte | F | live | GFP + |
| | GENE 1 | SEQ ID NO | GENE 2 | SEQ ID NO | % | live % | CD8 (%) | CD8 (%) |
| 1 | CD28-D124E + T195P | 251 | none | N/A | 59.5 | 62.8 | 24.2 | 38.5 |
| 2 | VHH-CD3e Fusion | 319 | none | N/A | 54.1 | 69.8 | 8.4 | 12 |
| 3 | VHH-CD3d Fusion | 320 | none | N/A | 47 | 59.7 | 7.2 | 12 |
| 4 | Survivin | 237 | none | N/A | 58 | 75.2 | 7.4 | 9.8 |
| 5 | Survivin | 237 | none | N/A | 50.2 | 67.9 | 6.5 | 9.7 |
| 6 | ESR: Anti-CD28-CD28 T195P | 318 | none | N/A | 54.3 | 71.2 | 5.2 | 7.3 |
| 7 | ESR: Anti-CD28-CD28 T195P | 318 | none | N/A | 49.1 | 67.5 | 4.8 | 7.1 |
| 8 | ESR: TNFR1-TM(TNFR1)-41BB | 302 | none | N/A | 50.4 | 74.7 | 4.5 | 6 |
| 9 | ESR: TNFR1-TM(TNFR1)-41BB | 302 | none | N/A | 60.9 | 14.8 | 0.64 | 4.4 |
| 10 | CD19 | 228 | none | N/A | 55.4 | 75.5 | 2.3 | 3.1 |
| 11 | Survivin | 237 | none | N/A | 28.9 | 72.9 | 2.1 | 3 |
| 12 | Tisagenlecleucel | 229 | none | N/A | 47.9 | 63.7 | 1.8 | 2.9 |
| 13 | Tisagenlecleucel | 229 | none | N/A | 49.3 | 62.1 | 1.2 | 1.9 |
| 14 | Bcl-X1 | 238 | none | N/A | 37.6 | 88.6 | 0.5 | 0.6 |
| 15 | VHH-CD3d Fusion | 320 | none | N/A | 51.1 | 75.5 | 0.3 | 0.4 |
| 16 | Fas/4-1BB | 319 | Casp7-DN | 262 | 14.4 | 35.1 | 17.9 | 51 |
| 17 | STAT3-Y640F | 246 | PIK3CA-L1001P | 257 | 21.3 | 64.8 | 30 | 46.3 |
| 18 | PTEN Antagonist: PAP1 | 258 | PIK3CA-L1001P | 257 | 30.3 | 46.3 | 7.4 | 16 |
| 19 | Bcl2 | 270 | v-src | 260 | 58.9 | 73.4 | 8.3 | 11.3 |
| 20 | CD28-D124E + T195P | 251 | PIK3CA-L1001P | 257 | 46.2 | 79.5 | 1.6 | 2 |
| 21 | Fas/4-1BB | 274 | PIK3CA-L1001P | 257 | 58.4 | 75.9 | 1.3 | 1.7 |
| 22 | RHOA-G17V | 252 | PIK3CA-L1001P | 257 | 39.8 | 51.6 | 0.5 | 0.9 |
| 23 | PTEN Antagonist: PAP4 | 259 | PIK3CA-L1001P | 257 | 46 | 64.9 | 0.3 | 0.5 |

TABLE 6

| | | | B | C |
|---|---|---|---|---|
| | | A | Receptor + | Receptor + |
| | Sample | Receptor | Survivin | CD28 |
| 1 | SEQ ID NO | 225 | 226 | 227 |
| 2 | GFP (%) at seeding | 7.1 | 10.8 | 8.2 |
| 3 | CD19+ at Day 3 | 89.2 | 29.1 | 23.1 |
| 4 | CD8+ at Day 3 | 6.3 | 42.7 | 50 |
| 5 | CD19+ Day 7 | 86.3 | 1.7 | 0.2 |
| 6 | CD8+ at Day 7 | 2.3 | 89.4 | 92.1 |

TABLE 7

| | A | B | C |
|---|---|---|---|
| | T-cell | Transposon | Survival |
| | transposon genes | SEQ ID NO. | length (days) |
| 1 | N/A | N/A | 24 |
| 2 | N/A | N/A | 25 |
| 3 | Receptor | 225 | 30 |
| 4 | Receptor + Survivin | 226 | 34 |
| 5 | Receptor + CD28 | 227 | 34 |

TABLE 8

| | | A | B | C | | | | | |
|---|---|---|---|---|---|---|---|---|---|
| | | ex vivo time (months) | survivin | CD28 mutant | D | E | F | G | H |
| 1 | Number of challenges | | | | 1 | 2 | 3 | 4 | 5 |
| 2 | Car-T + NALM6 | 10 | no | no | 100% | 85% | 47% | 23% | 10% |
| 3 | Car_Suv-T + NALM6 | 10 | yes | no | 100% | 99% | 82% | 80% | 76% |
| 4 | Car_CD28mut-T + NALM6 | 10 | no | yes | 100% | 100% | 84% | 85% | 82% |
| 5 | CAR02R Car-T + NALM6 | 4 | no | no | 100% | 100% | 51% | 28% | 27% |
| 6 | CAR02R Car_Suv-T + NALM6 | 4 | yes | no | 100% | 100% | 96% | 87% | 90% |
| 7 | CAR02R Car_CD28mut-T + NALM6 | 4 | no | yes | 100% | 100% | 97% | 87% | 91% |

TABLE 9

| | | | | C | D | E | F | G | H | I | J |
|---|---|---|---|---|---|---|---|---|---|---|---|
| | | A | B | donor 1 | donor 1 | donor 1 | donor 1 | donor 2 | donor 2 | donor 2 | donor 2 |
| | | Gene Name | Gene SEQ ID NO | 1 day | 14 days | 28 days | 42 days | 1 day | 14 days | 28 days | 42 days |
| 1 | 342140 | STAT3_D661Y | 247 | 6 | 4.7 | 14 | 61.5 | 5.4 | 10.1 | 8.6 | 31.2 |
| 2 | 335791 | Bcl-XI | 238 | 17.5 | 24.5 | 31.4 | 60.7 | 20.6 | 11.6 | 39 | 42 |
| 3 | 342141 | STAT3_S614R_Y640F | 248 | 5.6 | 3.9 | 11.5 | 54.5 | 17.8 | 6.2 | 6.9 | 36.7 |
| 4 | 340909 | ESR: TNFR1-TM-CD27 | 301 | 30.6 | 34.1 | 8.9 | 49.5 | 32.5 | 8.1 | 4.7 | 5.2 |
| 5 | 340911 | ESR: TNFR1-TM-41BB | 302 | 9.6 | 8 | 17 | 33.4 | 8.4 | 10.2 | 7.5 | 6.8 |
| 6 | 335845 | PLCG1 (S345F) | 254 | 7.2 | 5.8 | 5.6 | 25.6 | 11.8 | 5.5 | 33.8 | 2.8 |
| 7 | 335829 | HSV-TK | 231 | 14.3 | 1.4 | 2.4 | 0.6 | 15.3 | 1.7 | 4.6 | 0.8 |
| 8 | 335829 | HSV-TK | 231 | 7.5 | 1.3 | 1.3 | 3.8 | 8 | 4.2 | 2.3 | 0.6 |

TABLE 10

| | | A | B | C | | | | | |
|---|---|---|---|---|---|---|---|---|---|
| | | Donor | Bcl-XL | BiTE | D | E | F | G | H |
| 1 | Number of challenges | | | | 1 | 2 | 3 | 4 | 5 |
| 2 | ND82 Bcl-Xl-T + N6 | 82 | yes | no | 21% | 9% | 24% | 23% | 22% |
| 3 | ND84 Bcl-Xl-T + N6 | 84 | yes | no | 24% | 10% | 27% | 28% | 29% |
| 4 | ND81 Bcl-Xl-T + N6 | 81 | yes | no | 24% | 8% | 24% | 22% | 21% |
| 5 | T + N6 | 81 | no | no | 24% | 23% | 32% | 20% | 39% |
| 6 | ND81 Bcl-Xl-T + N6 + BiTE | 81 | yes | yes | 87% | 98% | 95% | 96% | 95% |
| 7 | ND82 Bcl-Xl-T + N6 + BiTE | 82 | yes | yes | 97% | 98% | 95% | 94% | 94% |
| 8 | ND84 Bcl-Xl-T + N6 + BiTE | 84 | yes | yes | 99% | 98% | 97% | 97% | 95% |
| 9 | T + N6 + BiTE | 81 | no | yes | 88% | 97% | 72% | 62% | 59% |

TABLE 11

| | | A | B | C | | | | | | |
|---|---|---|---|---|---|---|---|---|---|---|
| | | survivin | CD28 mutant | Bcl-XL | D | E | F | G | H | I |
| 1 | Number of challenges | | | | 1 | 2 | 3 | 4 | 5 | 6 |
| 2 | Car-T + NALM6 | no | no | no | 70% | 97% | 69% | 59% | 58% | 53% |
| 3 | Car_Suv-T + NALM6 | yes | no | no | 69% | 98% | 86% | 87% | 84% | 85% |
| | Car_CD28mut- | | | | | | | | | |
| 4 | T + NALM6 | no | yes | no | 68% | 98% | 88% | 87% | 85% | 85% |
| | CAR_Bcl-xL- | | | | | | | | | |
| 5 | T + NALM6 | no | no | yes | 70% | 100% | 99% | 96% | 94% | 94% |
| 6 | Mock-T + NALM6 | no | no | no | 12% | 15% | 15% | 16% | 15% | 13% |

TABLE 12

| | B | C | D | E |
|---|---|---|---|---|
| | Donor 1: | Donor 1: | Donor 2: | Cdonor 2: |
| | ESR | Control | ESR | Control |
| A | CD8+ | CD8+ | CD8+ | CD8+ |
| Days | GFP+ (%) | GFP+ (%) | GFP+ (%) | GFP+ (%) |
| 1 | 18.4 | 14.3 | ND | 15.3 |
| 14 | 94.3 | 1.4 | 13.5 | 1.7 |
| 28 | ND | 2.4 | 98.4 | 4.6 |

TABLE 13

| | CD8+ |
|---|---|
| Day | GFP+ (%) |
| 1 | 4.5 |
| 7 | 1.9 |
| 28 | 31 |
| 48 | 50.4 |
| 54 | 97.6 |

[0216] The invention includes the follow numbered embodiments:
[0217] 1. A polynucleotide comprising an immune cell survival-enhancing gene comprising a nucleic acid encoding a protein operably linked to a heterologous regulatory sequence effective for expression of the protein within an immune cell thereby enhancing survival of the immune cell.
[0218] 2. The polynucleotide of embodiment 1, wherein the immune cell survival-enhancing gene encodes a naturally occurring protein comprising an activating mutation.
[0219] 3. The polynucleotide of embodiment 1 or 2, wherein the immune cell survival-enhancing gene encodes a protein selected from STAT3, CD28, RhoA, PLCG, STAT5B or CCND1 comprising an activating mutation.
[0220] 4. The polynucleotide of embodiment 3, wherein the immune cell survival-enhancing gene encodes STAT3, wherein the STAT3 comprises one or more of the following activating mutations: F174S, H410R, S614R, E616K, G618R, Y640F, N6471, E652K, K658Y, K658R, K658N, K658M, K658R, K658H, K658N, D661Y or D661V.
[0221] 5. The polynucleotide of embodiment 3 wherein the immune cell survival-enhancing gene encodes CD28, wherein the CD28 comprises one or more of the following activating mutations: D124E, D124V, T1951 or T195P.
[0222] 6. The polynucleotide of embodiment 3, wherein the immune cell survival-enhancing gene encodes RhoA, wherein the RhoA comprises one or more of the following activating mutations: G17V or K18N.
[0223] 7. The polynucleotide of embodiment 3, wherein the immune cell survival-enhancing gene encodes PLCG, wherein the PLGC comprises one of the following activating mutations: S345F, S520F or R707Q.
[0224] 8. The polynucleotide of embodiment 3, wherein the immune cell survival-enhancing gene encodes STAT5B, wherein the STAT5B comprises one or more of the following activating mutations: N642H, T648S, S652Y, Y665F or P267A.
[0225] 9. The polynucleotide of embodiment 3, wherein the immune cell survival-enhancing gene encodes CCND1, wherein the CCND1 comprises one or more of the following activating mutations: E36G, E36Q, E36K, A39S, S41L, S41P, S41T, V42E, V42A, V42L, V42M, Y44S, Y44D, Y44C, Y44H, K46T, K46R, K46N, K46E, C47G, C47R, C47S, C47W, P199R, P199S, P199L, S201F, T2851, T285A, P286L, P286H, P286S, P286T or P286A.
[0226] 10. The polynucleotide of embodiment 1, wherein the immune cell survival-enhancing gene encodes a naturally occurring human protein.
[0227] 11. The polynucleotide of embodiment 10, wherein the immune cell survival-enhancing gene encodes a protein selected from Survivin, Bcl2, Bcl6 or Bcl-XL.
[0228] 12. The polynucleotide of embodiment 1, wherein the immune cell survival-enhancing gene encodes an inhibitor of apoptosis.
[0229] 13. The polynucleotide of any preceding embodiment, wherein the heterologous promoter is selected from an EF1 promoter, a PGK promoter, a GAPDH promoter, an EEF2 promoter, a ubiquitin promoter, an SV40 promoter or an HSVTK promoter
[0230] 14. The polynucleotide of any one of embodiments 1-12, wherein the heterologous promoter is selected from SEQ ID Nos: 94-154.
[0231] 15. The polynucleotide of any preceding embodiment, wherein the polynucleotide further comprises a pair of sequences selected from SEQ ID NOs: 6 and 7, or SEQ ID NOs: 14 and 15, or SEQ ID NOs: 18 and 19, or SEQ ID NOs: 20 and 21, or SEQ ID NOs: 26 and 27, or SEQ ID NOs: 399 and 400.
[0232] 16. The polynucleotide of any preceding embodiment, wherein the half-life of an immune cell whose genome comprises the polynucleotide is increased by at least 25% relative to the half-life of an immune cell whose genome does not comprise the polynucleotide.
[0233] 17. The polynucleotide of any preceding embodiment, wherein the maximum life span of an immune cell whose genome comprises the polynucleotide is increased by at least 25% relative to the maximum life span of an immune cell whose genome does not comprise the polynucleotide.
[0234] 18. The polynucleotide of any preceding embodiment, wherein the doubling time of an immune cell whose genome does not comprise the polynucleotide is greater by at least 25% relative to the doubling time of an immune cell whose genome comprises does comprise the polynucleotide.
[0235] 19. The polynucleotide of any preceding embodiment, wherein the proliferation rate of an immune cell whose genome comprises the polynucleotide is increased by at least 25% relative to the proliferation rate of an immune cell whose genome does not comprise the polynucleotide.
[0236] 20. The polynucleotide of any preceding embodiment, wherein the survival upon repeated antigen challenge of a T-cell whose genome comprises the polynucleotide is increased by at least 25% relative to the survival of an immune cell whose genome does not comprise the polynucleotide.
[0237] 21. A transposon comprising the polynucleotide of any preceding embodiment.
[0238] 22. A lentiviral vector comprising the polynucleotide of any one of embodiments 1-20.
[0239] 23. A method for creating a modified immune cell, the method comprising introducing into an immune cell a polynucleotide encoding an inhibitor of apoptosis operably linked to a heterologous promoter.
[0240] 24. The method of embodiment 23, wherein the polynucleotide further comprises transposon ends, and wherein the method further comprises introducing into the immune cell a corresponding transposase, such that the polynucleotide encoding the inhibitor of apoptosis is transposed into the genome of the immune cell.
[0241] 25. The method of embodiment 23 or 24, wherein the transposase is introduced as a nucleic acid encoding the transposase.
[0242] 26. The method of embodiment 25, wherein the nucleic acid is an mRNA.
[0243] 27. The method of embodiment 24 or 25, wherein the nucleic acid encoding the transposase is operably linked to a promoter that is active in the immune cell.
[0244] 28. The method of embodiment 24, wherein the transposon and transposase are introduced into the immune cell at the same time.
[0245] 29. The method of embodiment 24, wherein the transposon and transposase are introduced into the immune cell at different times.
[0246] 30. The method of any one of embodiments 23-29, wherein the immune cell is a T-cell, the method further comprising introducing into the immune cell a gene encoding a receptor capable of binding to an antigen, wherein binding of the receptor to a target cell which displays the antigen on its surface causes the T-cell to kill the target cell.
[0247] 31. The method of any one of embodiments 23-29, wherein the inhibitor of apoptosis is selected from Survivin, Bcl2, Bcl6, Bcl-XL or a dominant negative mutant of Casp3, Casp7, Casp8, Casp9 or Casp10.
[0248] 32. A method for creating a modified immune cell, the method comprising introducing into an immune cell a polynucleotide encoding a protein selected from STAT3, CD28, RhoA, PLCG, STAT5B or CCND1, wherein the protein comprises an activating mutation operably linked to a heterologous promoter.
[0249] 33. A method for creating a modified immune cell, the method comprising introducing into an immune cell a polynucleotide encoding a polypeptide comprising
   [0250] a. a sequence derived from the extracellular domain of a receptor that normally transmits an inhibitory signal to an immune cell
   [0251] b. a sequence derived from the intracellular domain of an intracellular domain of a receptor that transmits a stimulatory signal to an immune cell
   [0252] c. a transmembrane domain and wherein the polypeptide does not comprise a CD3 zeta intracellular domain.
[0253] 34. The method of embodiment 33, wherein the extracellular domain comprises a sequence selected from SEQ ID NOs: 322-340.
[0254] 35. The method of embodiment 33 or 34, wherein the intracellular domain comprises a sequence selected from SEQ ID NOs: 341-364.
[0255] 36. The method of embodiment 33, wherein the polypeptide comprises a sequence selected from SEQ ID NOs: 274-318.
[0256] 37. An immune cell whose genome comprises the polynucleotide of any one of embodiments 1-22.
[0257] 38. The immune cell of embodiment 37, wherein the half-life of the immune cell is increased by at least 25% relative to the half-life of an immune cell whose genome does not comprise the polynucleotide of embodiment 1.
[0258] 39. The immune cell of embodiment 37 or 38, wherein the maximum life span of the immune cell is increased by at least 25% relative to the maximum life span of an immune cell whose genome does not comprise the polynucleotide of embodiment 1.
[0259] 40. The immune cell of any one of embodiments 37-39, wherein the doubling time of an immune cell whose genome does not comprise the polynucleotide of embodiment 1 is increased by at least 25% relative to the half-life of an immune cell whose genome comprises the polynucleotide of embodiment 1.
[0260] 41. The immune cell of any one of embodiments 37-40, wherein the proliferation rate of the immune cell is increased by at least 25% relative to the proliferation rate of an immune cell whose genome does not comprise the polynucleotide of embodiment 1.
[0261] 42. The immune cell of any one of embodiments 37-41, wherein the survival upon repeated antigen challenge of a T-cell whose genome comprises the polynucleotide is increased by at least 25% relative to the survival of an immune cell whose genome does not comprise the polynucleotide.
[0262] 43. The immune cell of any one of embodiments 37-42, wherein the immune cell is a T-cell.
[0263] 44. The immune cell of any one of embodiments 37-42, wherein the immune cell is a B-cell.
[0264] 45. The immune cell of any one of embodiments 37-42, wherein the immune cell is a

$$human cell .$$

[0265] 46. The immune cell of any one of embodiments 37-42, wherein the immune cell is a primate cell, a rodent cell, a cat cell, a dog cell or a horse cell.
[0266] 47. The polynucleotide of embodiment 1, wherein the immune cell survival-enhancing gene encodes an enhanced signaling receptor (ESR) wherein the ESR comprises
   [0267] a. a sequence derived from the extracellular domain of a receptor that normally transmits an inhibitory signal to an immune cell
   [0268] b. a sequence derived from the intracellular domain of an intracellular domain of a receptor that transmits a stimulatory signal to an immune cell
   [0269] c. a transmembrane domain
   [0270] and wherein the ESR does not comprise a CD3 zeta intracellular domain
[0271] 48. The polynucleotide of embodiment 47, wherein the extracellular domain (a) is from a human protein selected from TNFRSF3 (LTRβ), TNFRSF6 (Fas), TNFRSF8 (CD30), TNFRSF10A (DR4), TNFRSF10B (DR5), TNFRSF19 (TROY), TNFRSF21 (DR6) and CTLA4.
[0272] 49. The polynucleotide of embodiment 47, wherein the ESR comprises a sequence that is at least 90% identical to a sequence selected from SEQ ID NO: 322-340.
[0273] 50. The polynucleotide of any one of embodiments 47-49, wherein the intracellular domain (b) is from a human protein selected from TNFRSF4 (OX40), TNFRSF5 (CD40), TNFRSF7 (CD27), TNFRSF9 (4-1BB), TNFRSF11A (RANK), TNFRSF13B (TACI), TNFRSF13C (BAFF-R), TNFRSF14 (HVEM), TNFRSF17 (CD269), TNFRSF18 (GITR), CD28, CD28H (TMIGD2), Inducible T-cell Costimulator (ICOS/CD278), DNAX Accessory Molecule-1 (DNAM-1/CD226), Signaling Lymphocytic Activation Molecule (SLAM/CD150), T-cell Immunoglobulin and Mucin domain (TIM-1/HAVcr-1), interferon receptor alpha chain (IFNAR1), interferon receptor beta chain IFNAR2), interleukin-2 receptor beta subunit (IL2RB), interleukin-2 receptor gamma subunit (IL2RG), Tumor Necrosis Factor Superfamily 14 (TNFSF14/LIGHT), Natural Killer Group 2 member D (NKG2D/CD314) and CD40 ligand (CD40L)
[0274] 51. The polynucleotide of any one of embodiments 47-50, wherein the ESR comprises a polypeptide whose sequence is at least 90% identical to a sequence selected from SEQ ID NOs: 341-364.
[0275] 52. The polynucleotide of any one of embodiments 47-51, wherein the ESR comprises a polypeptide whose sequence is at least 90% identical to a sequence selected from SEQ ID NOs: 365-396.
[0276] 53. The polynucleotide of any one of embodiments 45-52, wherein the ESR comprises a polypeptide whose sequence is at least 90% identical to a sequence selected from SEQ ID NOs: 274-318.
[0277] 54. The polynucleotide of any one of embodiments 47-53, wherein the polynucleotide further comprises a segment encoding an inhibitor of apoptosis operably linked to a heterologous promoter.
[0278] 55. An immune cell whose genome comprises the polynucleotide of any one of embodiments 47-54.
[0279] 56. The immune cell of embodiment 55, wherein the immune cell genome further comprises a segment encoding an inhibitor of apoptosis operably linked to a heterologous promoter.
[0280] 57. A method for creating a modified immune cell, the method comprising
   [0281] a. introducing into the immune cell the polynucleotide of embodiment 47.
   [0282] b. introducing into the immune cell a polynucleotide encoding an inhibitor of apoptosis, operably linked to a heterologous promoter.
[0283] 58. The method of embodiment 57, wherein the two polynucleotides are introduced into the immune cell at the same time.
[0284] 59. A method of identifying a protein enhancing survival of an immune cell, comprising sequencing nucleic acids encoding proteins from a cancerous immune cell to identify a nucleic acid encoding a protein with a mutation;
   [0285] transforming an immune cell with the nucleic acid encoding the protein with the mutation; and determining whether the immune cell has enhanced survival.

### REFERENCES

[0286] All references cited herein are incorporated herein by reference in their entirety and for all purposes to the same extent as if each individual publication or patent or patent application was specifically and individually indicated to be incorporated by reference in its entirety for all purposes. If different content is associated with a citation at different times, the content associated with the citation at the priority date of the invention is meant.

[0287] Many modifications and variations of this invention can be made without departing from its spirit and scope, as will be apparent to those skilled in the art. The specific embodiments described herein are offered by way of example only, and the invention is to be limited only by the terms of the appended claims, along with the full scope of equivalents to which such claims are entitled.

The application's sequence listing, which the Patent Office published only in electronic form, follows.

SEQUENCE LISTING (401 sequences)

SEQ ID NO: 1 - DNA, 64 bp, Artificial Sequence
  Synthetic
atcacgcatgggatacgtcgtggcagtaaaagggcttaaatgccaacgacgcgtcccatacgtt

SEQ ID NO: 2 - DNA, 82 bp, Artificial Sequence
  Synthetic
atgacgcatgggatacgtcgtggcagtaaaagggcttaaatgccaacgacgcgtcccatacgttgttggcattttaagtctt

SEQ ID NO: 3 - DNA, 82 bp, Artificial Sequence
  Synthetic
atgacgcatgggatacgtcgtggcagtaaaagggcttaaatgccaacgacgcgtcccatacgttgttggcattttaattctt

SEQ ID NO: 4 - DNA, 106 bp, Artificial Sequence
  Synthetic
cctgggtaaactaaaagtcccctcgaggaaaggcccctaaagtgaaacagtgcaaaacgttcaaaaactgtctggcaatacaagttccactttgggacaaatcggc

SEQ ID NO: 5 - DNA, 105 bp, Artificial Sequence
  Synthetic
cctgggtaaactaaaagtcccctcgaggaaaggcccctaaagtgaaacagtgcaaaacgttcaaaaactgtctggcaatacaagttccactttgaccaaaacggc

SEQ ID NO: 6 - DNA, 14 bp, Artificial Sequence
  Synthetic
ccytttbmctgcca

SEQ ID NO: 7 - DNA, 14 bp, Artificial Sequence
  Synthetic
tggcagkvaaargg

SEQ ID NO: 8 - DNA, 14 bp, Artificial Sequence
  Synthetic
ccctttgcctgcca

SEQ ID NO: 9 - DNA, 14 bp, Artificial Sequence
  Synthetic
tggcagtgaaaggg

SEQ ID NO: 10 - DNA, 14 bp, Artificial Sequence
  Synthetic
cctttttactgcca

SEQ ID NO: 11 - DNA, 14 bp, Artificial Sequence
  Synthetic
tggcagtaaaaggg

SEQ ID NO: 12 - DNA, 205 bp, Artificial Sequence
  Synthetic
cagggtatctcataccctggtaaaattttaaagttgtgtattttataaaattttcgtctgacaacactagcgcgctcagtagctggaggcaggagcgtgcgggaggggatagtggcgtgatcgcagtgtggcacgggacaccggcgagatattcgtgtgcaaacctgtttcgggtatgttataccctgcctcattgttgacgtat

SEQ ID NO: 13 - DNA, 192 bp, Artificial Sequence
  Synthetic
tttaagaaaaagattaataaataataataatttcataattaaaaacttctttcattgaatgccattaaataaaccattattttacaaaataagatcaacataattgagtaaataataataagaacaatattatagtacaacaaaatatgggtatgtcataccctgccacattcttgatgtaactttttttca

SEQ ID NO: 14 - DNA, 16 bp, Artificial Sequence
  Synthetic
cccggcgagcatgagg

SEQ ID NO: 15 - DNA, 16 bp, Artificial Sequence
  Synthetic
cctcatgctcgccggg

SEQ ID NO: 16 - DNA, 309 bp, Artificial Sequence
  Synthetic
ccctagaaagatagtctgcgtaaaattgacgcatgcattcttgaaatattgctctctctttctaaatagcgcgaatccgtcgctgtgcatttaggacatctcagtcgccgcttggagctcccgtgaggcgtgcttgtcaatgcggtaagtgtcactgattttgaactataacgaccgcgtgagtcaaaatgacgcatgattatcttttacgtgacttttaagatttaactcatacgataattatattgttatttcatgttctacttacgtgataacttattatatatatattttcttgttatagatatc

SEQ ID NO: 17 - DNA, 231 bp, Artificial Sequence
  Synthetic
tttgttactttatagaagaaattttgagtttttgtttttttttaataaataaataaacataaataaattgtttgttgaatttattattagtatgtaagtgtaaatataataaaacttaatatctattcaaattaataaataaacctcgatatacagaccgataaaacacatgcgtcaattttacgcatgattatctttaacgtacgtcacaatatgattatctttctaggg

SEQ ID NO: 18 - DNA, 13 bp, Artificial Sequence
  Synthetic
ccctagaaagata

SEQ ID NO: 19 - DNA, 13 bp, Artificial Sequence
  Synthetic
tatctttctaggg

SEQ ID NO: 20 - DNA, 15 bp, Artificial Sequence
  Synthetic
cacttggattgcggg

SEQ ID NO: 21 - DNA, 15 bp, Artificial Sequence
  Synthetic
cccgacaccgtagtg

SEQ ID NO: 22 - DNA, 262 bp, Artificial Sequence
  Synthetic
aaacgagttaagtcggctcgcgtgaattgcgcgtactccgcgggagccgtcttaactcggttcatatagatttgcggtggagtgcgggaaacgtgtaaactcgggccgattgtaactgcgtattaccaaatatttgtttccaagcttggtaccgagctcggatcccgtacgctgcaggtcgacggatccccgggttaattaaggcgcgccagatctgtttagcttgcctcgtccccgccgggtcacccggccagcgacatgg

SEQ ID NO: 23 - DNA, 227 bp, Artificial Sequence
  Synthetic
tgtcgaagaattcggcggccgcatgcatctagagaattatttatgtactgaatagataaaaaaatgtctgtgattgaataaattttcattttttacacaagaaaccgaaaatttcatttcaatcgaacccatacttcaaaagatataggcattttaaactaactctgattttgcgcgggaaacctaaataattgcccgcgccatcttatattttggcgggaaattca

SEQ ID NO: 24 - DNA, 227 bp, Artificial Sequence
  Synthetic
cagttgaagtcggaagtttacatacacttaagttggagtcattaaaactcgtttttcaactacaccacaaatttcttgttaacaaacaatagttttggcaagtcagttaggacatctactttgtgcatgacacaagtcatttttccaacaattgtttacagacagattatttcacttataattcactgtatcacaattccagtgggtcagaagtttacatacactaa

SEQ ID NO: 25 - DNA, 229 bp, Artificial Sequence
  Synthetic
ttgagtgtatgttaacttctgacccactgggaatgtgatgaaagaaataaaagctgaaatgaatcattctctctactattattctgatatttcacattcttaaaataaagtggtgatcctaactgaccttaagacagggaatctttactcggattaaatgtcaggaattgtgaaaaagtgagtttaaatgtatttggctaaggtgtatgtaaacttccgacttcaactg

SEQ ID NO: 26 - DNA, 32 bp, Artificial Sequence
  Synthetic
cagttgaagtcggaagtttacatacacttaag

SEQ ID NO: 27 - DNA, 32 bp, Artificial Sequence
  Synthetic
ctaaggtgtatgtaaacttccgacttcaactg

SEQ ID NO: 28 - protein, 340 aa, Artificial Sequence
  Synthetic
MGKSKEISQDLRKRIVDLHKSGSSLGAISKRLAVPRSSVQTIVRKYKHHGTTQPSYRSGRRRVLSPRDERTLVRKVQINPRTTAKDLVKMLEETGTKVSISTVKRVLYRHNLKGHSARKKPLLQNRHKKARLRFATAHGDKDRTFWRNVLWSDETKIELFGHNDHRYVWRKKGEACKPKNTIPTVKHGGGSIMLWGCFAAGGTGALHKIDGIMDKENYVDILKQHLKTSVRKLKLGRKWVFQHDNDPKHTSKVVAKWLKDNKVKVLEWPSQSPDLNPIENLWAELKKRVRARRPTNLTQLHQLCQEEWAKIHPNYCGKLVEGYPKRLTQVKQFKGNATKY

SEQ ID NO: 29 - protein, 592 aa, Artificial Sequence
  Synthetic
MAQHSDYSDDEFCADKLSNYSCDSDLENASTSDEDSSDDEVMVRPRTLRRRRISSSSSDSESDIEGGREEWSHVDNPPVLEDFLGHQGLNTDAVINNIEDAVKLFIGDDFFEFLVEESNRYYNQNRNNFKLSKKSLKWKDITPQEMKKFLGLIVLMGQVRKDRRDDYWTTEPWTETPYFGKTMTRDRFRQIWKAWHFNNNADIVNESDRLCKVRPVLDYFVPKFINIYKPHQQLSLDEGIVPWRGRLFFRVYNAGKIVKYGILVRLLCESDTGYICNMEIYCGEGKRLLETIQTVVSPYTDSWYHIYMDNYYNSVANCEALMKNKFRICGTIRKNRGIPKDFQTISLKKGETKFIRKNDILLQVWQSKKPVYLISSIHSAEMEESQNIDRTSKKKIVKPNALIDYNKHMKGVDRADQYLSYYSILRRTVKWTKRLAMYMINCALFNSYAVYKSVRQRKMGFKMFLKQTAIHWLTDDIPEDMDIVPDLQPVPSTSGMRAKPPTSDPPCRLSMDMRKHTLQAIVGSGKKKNILRRCRVCSVHKLRSETRYMCKFCNIPLHKGACFEKYHTLKNYLEKRGPSLRLAVVLQHRKSL

SEQ ID NO: 30 - protein, 594 aa, Artificial Sequence
  Synthetic
MGSSLDDEHILSALLQSDDELVGEDSDSEVSDHVSEDDVQSDTEEAFIDEVHEVQPTSSGSEILDEQNVIEQPGSSLASNRILTLPQRTIRGKNKHCWSTSKSTRRSRVSALNIVRSQRGPTRMCRNIYDPLLCFKLFFTDEIISEIVKWTNAEISLKRRESMTSATFRDTNEDEIYAFFGILVMTAVRKDNHMSTDDLFDRSLSMVYVSVMSRDRFDFLIRCLRMDDKSIRPTLRENDVFTPVRKIWDLFIHQCIQNYTPGAHLTIDEQLLGFRGRCPFRVYIPNKPSKYGIKILMMCDSGTKYMINGMPYLGRGTQTNGVPLGEYYVKELSKPVHGSCRNITCDNWFTSIPLAKNLLQEPYKLTIVGTVRSNKREIPEVLKNSRSRPVGTSMFCFDGPLTLVSYKPKPAKMVYLLSSCDEDASINESTGKPQMVMYYNQTKGGVDTLDQMCSVMTCSRKTNRWPMALLYGMINIACINSFIIYSHNVSSKGEKVQSRKKFMRNLYMSLTSSFMRKRLEAPTLKRYLRDNISNILPKEVPGTSDDSTEEPVMKKRTYCTYCPSKIRRKANASCKKCKKVICREHNIDMCQSCF

SEQ ID NO: 31 - protein, 589 aa, Artificial Sequence
  Synthetic
MAKRFYSAEEAAAHCMASSSEEFSGSDSEYVPPASESDSSTEESWCSSSTVSALEEPMEVDEDVDDLEDQEAGDRADAAAGGEPAWGPPCNFPPEIPPFTTVPGVKVDTSNFEPINFFQLFMTEAILQDMVLYTNVYAEQYLTQNPLPRYARAHAWHPTDIAEMKRFVGLTLAMGLIKANSLESYWDTTTVLSIPVFSATMSRNRYQLLLRFLHFNNNATAVPPDQPGHDRLHKLRPLIDSLSERFAAVYTPCQNICIDESLLLFKGRLQFRQYIPSKRARYGIKFYKLCESSSGYTSYFLIYEGKDSKLDPPGCPPDLTVSGKIVWELISPLLGQGFHLYVDNFYSSIPLFTALYCLDTPACGTINRNRKGLPRALLDKKLNRGETYALRKNELLAIKFFDKKNVFMLTSIHDESVIREQRVGRPPKNKPLCSKEYSKYMGGVDRTDQLQHYYNATRKTRAWYKKVGIYLIQMALRNSYIVYKAAVPGPKLSYYKYQLQILPALLFGGVEEQTVPEMPPSDNVARLIGKHFIDTLPPTPGKQRPQKGCKVCRKRGIRRDTRYYCPKCPRNPGLCFKPCFEIYHTQLHY

SEQ ID NO: 32 - protein, 589 aa, Artificial Sequence
  Synthetic
MAKRFYSAEEAAAHCMAPSSEEFSGSDSEYVPPASESDSSTEESWCSSSTVSALEEPMEVDEDVDDLEDQEAGDRADAAAGGEPAWGPPCNFPPEIPPFTTVPGVKVDTSNFEPINFFQLFMTEAILQDMVLYTNVYAEQYLTQNPLPRYARAHAWHPTDIAEMKRFVGLTLAMGLIKANSLESYWNTTTVLSIPVFSATMSRNRYQLLLRFLHFNNNATAVPPDQPDHDRLHKLRPLIDSLSERFAAVYTPCQNICIDESLLLFKGRLRFRQYIPSKRARYGIKFYKLCESSSGYTSYFLIYEGKDSKLDPPGCPPDLTVSGKIVWELISPLLGQGFHLYVDNFYSSIPLFTALYCLDTPACGTINRTRKGLPRALLDKKLNRGETYALRKNELLAIKFFDKKNVFMLTSIHDESVIREQRVGRPPKNKPLCSKEYSKYMGGVDRTDQLQHYYNATRKTSAWYKKVGIYLIQMALRNSYIVYKAAVPGPKLSYYKYQLQILPALLFGGVEEQTVPEMLPSDNVARLIGKHFIDTLPPTPGKQRPQKGCKVCRKRGIRRDTRYYCPKCPRNPGLCFKPCFEIYHTQLHY

SEQ ID NO: 33 - protein, 589 aa, Artificial Sequence
  Synthetic
MAKRFYSAEEAAAHCMASSSEEFSGSDSEYVPPASESDSSTEESWCSSSTVSALEEPMEVDEDVDDLEDQEAGDRADAAAGGEPAWGPPCNFPPEIPPFTTVPGVKVDTSNYEPINFFQLFMTEAILQDMVLYTNVYAEQYLTQNPLPRYARAHAWHPTDIAEMKRFVGLTLAMGLIKANSLESYWDTTTVLSIPVFSATMSRNRYQLLLRFLHFNNNATAVPPDQPGHDRLHKLRPLIDSLSERFAAVYTPCQNICIDESLLLFKGRLQFRQYIPSKRARYGIKFYKLCESSSGYTSYFLIYEGKDSKLDPPGCPPDLTVSGKIVWELISPLLGQGFHLYVDNFYSSIPLFTALYCLDTPACGTINRNRKGLPRALLDKKLNRGETYALRKNELLAIKFFDKKNVFMLTSIHDESVIREQRVGRPPKNKPLCSKEYSKYMGGVDRTDQLQHYYNATRKTRAWYKKVGIYLIQMALRNSYIVYKAAVPGPKLSYYKYQLQILPALLFGGVEEQTVPEMPPSDNVARLIGKHFIDTLPPTPGKQRPQKGCKVCRKRGIRRDTRYYCPKCPRNPGLCFKPCFEIYHTQLHY

SEQ ID NO: 34 - protein, 589 aa, Artificial Sequence
  Synthetic
MAKRFYSAEEAAAHCMASSSEEFSGSDSEYVPPASESDSSTEESWCSSSTVSALEEPMEVDEDVDDLEDQEAGDRADAAAGGEPAWGPPCNFPPEIPPFTTVPGVKVDTSNFEPINFFQLFMTEAILQDMVLYTNVYAEQYLTQVPLPRYARAHAWHPTDIAEMKRFVGLTLAMGLIKANSLESYWDTTTVLNIPVFSATMSRNRYQLLLRFLEFNNEATAVPPDQPGHDRLHKLRPLIDSLSERFAAVYTPCQNICIDESLLLFKGRLQFRQYIPSKRARYGIKFYKLCESSSGYTSYFLIYEGKDSKLDPPGCPPDLTVSGKIVWELISPLLGQGFHLYVDNFYSSIPLFTALYCLDTPACGTINRNRKGLPRALLDKKLNRGETYALRKNELLAIKFFDKKNVFMLTSIHDESVIREQRVGRPPKNKPLCSKEYSKYMGGVDRTDQLQHYYNATRKTRAWYKKVGIYLIQMALRNSYIVYKAAVPGPKLSYYKYQLQILPALLFGGVEEQTVPEMPPSDNVARLIGKHFIDTLPPTPGKQRPQKGCKVCRKRGIRRDTRYYCPKCPRNPGLCFKPCFEIYHTQLHY

SEQ ID NO: 35 - protein, 589 aa, Artificial Sequence
  Synthetic
MAKRFYSAEEAAAHCMASSQEEFSGSDSEYVPPASESDSSTEESWCSSSTVSALEEPMEVDEDVDDLEDQEAGDRADAAAGGEPAWGPPCNFPPEIPPFTTVPGVKVDTSNFEPINFFQLFMTEAILQDMVLYTNVYAEQYLTQNPLTRYARAHAWHPTDIAEMKRFVGLTLAMGLIKANSLESYWDTTTVLSIPVFGATMSRNRYQLLLRFLHFNNNATAVPPDQPGHDRLHKLRPLIDSLSERFANVYTPCQNICIDESLLLFKGRLQFKQYIPSKRARYGIKFYKLCESSSGYTSYFLIYEGKDSKLDPPGCPPDLTVSGKIVWELISPLLGQGFHLYVDNFYSSIPLFTALYCLNTPACGTINRNRKGLPRALLDKKLNRGETYALRKNELLAIKFFDKKNVFMLTSIHDESVIREQRVGRPPKNKPLCSKEYSKYMGGVDRTDQLQHYYNATRKTRHWYKKVGVYLIQMALRNSYIVYKAAVPGPKLSYYKYQLQILPALLFGGVEEQTVPEMPDSDNVARLIGKHFIDTLPPTPGKQRPQKGCKVCRKRGIRRDTRYYCPKCPRNPGLCRKPCFEIYHTQLHY

SEQ ID NO: 36 - protein, 589 aa, Artificial Sequence
  Synthetic
MAKRFYSAEEAAAHCMASSSEEFSGSDSEYVPPASESDSSTEESWCSSSTVSALEEPMEVDEDVDDLEDQEAGDRADAAAGGEPAWGPPCNFPPEIPPFTTVPGVKVDTSNFEPINFFQLFMTEAILQDMVLYTNVYAEQYLTQNPLTRYARAHAWHPTDICEMKRFVGLTLAMGLIKANSLESYWDTTTVLSIPVFGATMSRNRYQLLLRFLHFNNNATAVPPDQPGHDRLHKLRPLIDSLSERFANVYTPCQNICIDESLLLFKGRLQFRQYIPSKRARYGIKFYKLCESSTGYTSYFLIYEGKDSKLDPPGCPPDLTVSGKIVWELISPLLGQGFHLYVDNFYSSIPLFTALYCLNTPACGTINRNRKGLPRALLDKKLNRGETYALRKNELLAIKFFDKKNVFMLTSIHDESVIREQRVGRPPKNKPLCSKEYSKYMGGVDRTDQLQHYYNATRKTRHWYKKVGVYLIQMALRNSYIVYKAAVPGPKLSYYKYQLQILPALLFGGVEEQTVPEMPDSDNVARLIGKHFIDTLPPTPGKQRPQKGCKVCRKRGIRRDTRYYCPKCPRNPGLCRKPCFEIYHTQLHY

SEQ ID NO: 37 - protein, 589 aa, Artificial Sequence
  Synthetic
MAKRFYSAEEAAAHCMASSSEQTSGSDSEYVPPASESDSSTEESWCSSSTVSALEEPMEVDEDVDDLEDQEAGDRADAAAGGEPAWGPPCNFPPEIPPFTTVPGVKVDTSNFEPINFFQLFMTEAILQDMVLYTNVYAEQYLTQNPLTRYARAHAWHPTDIAEMKRFVGLTLAMGLIKANSIESYWDTTTVLSIPVFGATMSRNRYQLLLRFLHFNNNATAVPPDQPGHDRLHKLRPLIDSLSERFANVYTPCQNICIDESLLLFKGRLQFRQYIPSKRARYGIKFYKLCESSSGYTSYFLIYEGKDSKLDPPGCPPDLTVSGKIVWELISPLLGQGFHLYVDNFYSSIPLFTALYCLNTPACGTINRNRKGLPRALLDKKLNRGETYALRKNELLAIKFFDKKNVFMLTSIHDESVIREQRVGRKPKNKPLCSKEYSKYMGGVDRTDQLQHYYNATRKTRHWYKKVGIYLIQMALRNSYIVYKAAVPGPKLSYYKYQLQILPALLFGGVEEQTVPEMPPSDNVARLIGKHFIDTLPPTPGKQRPQKGCKVCRKRGIRRDTRYYCPKCPRNPGLCRKPCFEIYHTQLHY

SEQ ID NO: 38 - protein, 589 aa, Artificial Sequence
  Synthetic
MAKRFYSAEEAAAHCSASSSEEFSGSDSEYVPPASESDSSTEESWCSSSTVSALEEPMEVDEDVDDLEDQEAGDRADAAAGGEPAWGPPCNFPPEIPPFTTVPGVKVDTSNFEPINFFQLFMTEAILQDMVLYTNVYAEQYLTQNPLTRGARAHAWHPTDIAEMKRFVGLTLAMGLIKANSLESYWDTTTVLSIPVFGATMSRNRYQLLLRFLHFNNNATAVPPDQPGHDRLHKLRPLIDSLSERFANVYTPCQNICIDESLMLFKGRLQFRQYIPSKRARYGIKFYKLCESSTGYTSYFLIYEGKDSKLDPPGCPPDLTVSGKIVWELISPLLGQGFHLYVDNFYSSIPLFTALYCLNTPACGTINRNRKGLPRALLDKKLNRGETYALRKNELLAIKFFDKKNVFMLTSIHDESVIREQRVGRPPKNKPLCSKEYSKYMGGVDRTDQLQHYYNATRKTRHWYKKVGIYLIQMALRNSYIVYKAAVPGPKLSYYKYQLQILPALLFGGVEEQTVPEMPPSDNVARLIGKHFIDTLPPTPGKQRPQKGCKVCRKRGIRRDTRYYCPKCPRNPGLCRKPCFEIYHTQLHY

SEQ ID NO: 39 - protein, 589 aa, Artificial Sequence
  Synthetic
MAKRFYSAEEAAAHCSASSSEEFSGSDSEYVPPASESDSSTEESWCSSSTVSALEEPMEVDEDVDDLEDQEAHDRADAAAGGEPAWGPPCNFPPEIPPFTTVPGVKVDTSNFEPINFFQLFMTEAILQDMVLYTNVYAEQYLTQNPLTRGARAHAWHPTDIAEMKRFVGLTLAMGLIKANSIESYWDTTTVLSIPVFGATMSRNRYQLLHRFLHFNNNATAVPPDQPGHDRLHKLRPLIDSLSERFANVYTPCQNICIDESLMLFKGRLQFRQYIPSKRARYGIKFYKLCESSTGYTSYFLIYEGKDSKLDPPGCPPDLTVSGKIVWELISPLLGQGFHLYVDNFYSSIPLFTALYCLNTPACGTINRNRKGLPRALLDKKLNRGETYALRKNELLAIKFFDKKNVFMLTSIHDESVIREQRVGRPPKNKPLCSKEYSKYMGGVDRTDQLQHYYNATRKTRHWYKKVGIYLIQMALRNSYIVYKAAVPGPKLSYYKYQLQILPALLFGGVEEQTVPEMPPSDSVARLIGKHFIDTLPPTPGKQRPQKGCKVCRKRGIRRDTRYYCPKCPRNPGLCRKPCFEIYHTQLHY

SEQ ID NO: 40 - protein, 589 aa, Artificial Sequence
  Synthetic
MAKRFYSAEEAAAHCSASSSEEFSGSDSEYVPPASESDSSTEESWCSSSTVSALEEPMEVDEDVDDLEDQEAGDRADAAAGGEPAWGPPCNFPPEIPPFTTVPGVKVDTSNFEPINFFQLFMTEAILQDMVLYTNVYAEQYLTQNPLTRGARAHAWHPTDIAEMKRFVGLTLAMGLIKANSIESYWDTTTVLSIPVFGATMSRNRYQLLLRFLHFNNNATAVPPDQPGHDRLHKLRPLIDSLSERFANVYTPCQNICIDESLMLFKGRLQFRQYIPSKRARYGIKFYKLCESSTGYTSYFLIYEGKDSKLDPPGCPPDLTVSGKIVWELISPLLGQGFHLYVDNFYSSIPLFTALYCLNTPACGTINRNRKGLPRALLDKKLNRGETYALRKNELLAIKFFDKKNVFMLTSIHDESVIREQRVGRPPKNKPLCSKEYSKYMGGVDRTDQLQHYYNATRKTRHWYKKVGIYLIQMALRNSYIVYKAAVPGPKLSYYKYQLQILPALLFGGVEEQTVPEMPDSDNVARLIGKHFIDTLPPTPGKQRPQKGCKVCRKRGIRRDTRYYCPKCPRNPGLCRKPCFEIYHTQLHY

SEQ ID NO: 41 - protein, 589 aa, Artificial Sequence
  Synthetic
MAKRFYSAEEAAAHCSASSSEQFSGSDSEYVPPASESDSSTEESWCSSSTVSALEEPMEVDEDVDDLEDQEAGDRADAAAGGEPAWGPPCNFPPEIPPFTTVPGVKVDTSNFEPINFFQLFMTEAILQDMVLYTNVYAEQYLTQNPLTRGARAHAWYPTDIAEMKRFVGLTLAMGLIKANSIESYWDTTTVLSIPVFGATMSRNRYQLLLRFLHFNNNATAVPPDQPGHDRLHKLRPLIDSLSERFANVYTPCQNICIDESLMLFKGRLQFRQYIPSKRARYGIKFYKLCESSTGYTSYFLIYEGKDSKLDPPGCPPDLTVSGKIVWELISPLLGQGFHLYVDNFYSSIPLFTALYCLNTPACGTINRNRKGLPRALLDKKLNRGETYALRKNELLAIKFFDKKNVFMLTSIHDESVIREQRVGRPPKNKPLCSKEYSKYMGGVDRGDQLQHYYNATRKTRHWYKKVGIYLIQMALRNSYIVYKAAVPGPKLSYYKYQLQILPALLFGGVEEQTVPEMPPSDNVARLIGKHFIDTLPPTPGKQRPQKGCKVCRKRGIRRDTRYYCPKCPRNPGLCRKPCFEIYHTQLHY

SEQ ID NO: 42 - protein, 589 aa, Artificial Sequence
  Synthetic
MAKRFYSAEEAAAHCSASSSEEFSGSDSEYVPPASESDSSTEESWCSSSTVSALEEPMEVDEDVDDLEDQEAGDRADAAAGGEPAWGPPCNFPPEIPPFTTVPGVKVDTSNFEPINFFQLFMTEAILQDMVLYTNVYAEQYLTQNPLTRGARAHAWHPTDIAEMKRFVGLTLAMGLIKANSIESYWDTTTVLSIPVFGATMSRNRYQLLLRFLHFNNNATAVPPDQPGHDRLHKLRPLIDSLSERFANVYTPCQNICIDESLMLFKGRLQFRQYIPSKRARYGIKFYKLCESSTGYMSYFLIYEGKDSKLDPPGCPPDLTVSGKIVWELISPLLGQGFHLYVDNFYSSIPLFTALYCLNTPACGTINRNRKGLPRALLDKKLNRGETYALRKNELLAIKFFDKKNVFMLTSIHDESVIREQRVGRKPKNKPLCSKEYSKYMGGVDRTDQLQHYYNATRKTRHWYKKVGIYLIQMALRNSYIVYKAAVPGPKLSYYKYQLQILPALLFGGVEEQTVPEMPPSDSVARLIGKHFIDTLPPTPGKQRPQKGCKVCRKRGIRRDTRYYCPKCPRNPGLCRKPCFEIYHTQLHY

SEQ ID NO: 43 - protein, 589 aa, Artificial Sequence
  Synthetic
MAKRFYSAEEAAAHCMASSSEEFYGSDSEYVPPASESDSSTEESWCSSSTVSALEEPMEVDEDVDDLEDQEAGDRADAAAGGEPAWGPPCNFPPEIPPFTTVPGVKVDTSNFEPINFFQLFMTEAILQDMVLYTNVYAEQYLTQNPLTRYARAHAWHPTDIAEMKRFVGLTLAMGLIKANSLESYWDTTTVLSIPVFGATMSRNRYQLLLRFLHFNNNATAVPPDQPGHDRLHKLRPLIDSLSERFANVYTPCQNICIDESLLLFKGRLQFKQYIPSKRARYGIKFYKLCESSSGYTSYFLIYEGKDSKLDPPGCPPDLTVSGKIVWELISPLLGQGFHLYVDNFYSSIPLFTALYCLNTPACGTINRNRKGLPRALLDKKLNRGETYALRKNELLAIKFFDKKNVFMLTSIHDESVIREQRVGRPPKNKPLCSKEYSKYMGGVDRTDQLQHYYNATRKTRHWYKKVGIYLIQMALRNSYIVYKAAVPGPKLSYYKYQLQILPALLFGGVEEQTVPEMPDSDNVARLIGKHFIDTLPPTPGKQRPQKGCKVCRKRGIRRDTRYYCPKCPRNPGLCRIPCFEIYHTQLHY

SEQ ID NO: 44 - protein, 589 aa, Artificial Sequence
  Synthetic
MAKRFYSAEEAAAHCSASSSEEFSGSDSEYVPPASESDSSTEESWCSSSTVSALEEPMEVDEDVDDLEDQEAGDRADAAAGGEPAWGPPCNFPPEIPPFTTVPGVKVDTSNFEPINFFQLFMTEAILQDMVLYTNVYAEQYLTQNPLTRYARAHAWHPTDICEMKRFVGLTLAMGLIKANSIESYWDTTTVLSIPVFGATMSRNRYQLLLRFLHFNNNATAVPPDQPGHDRLHKLRPLIDSLSERFANVYTPCQNICIDESLMLFKGRLQFRQYIPSKRARYGIKFYKLCESSTGYTSYFLIYEGKDSKLDPPGCPPDLTVSGKIVWELISPLLGQGFHLYVDNFYSSIPLFTALYVLNTPACGTINRNRKGLPRALLDKKLNRGETYALRKNELLAIKFFDKKNVFMLTSIHDESVIREQRVGRPPKNKPLCSKEYSKYMGGVDRTDQLQHYYNATRKTRHWYKKVGIYLIQMALRNSYIVYKAAVPGPKLSYYKYQLQILPALLFGGVEEQTVPEMPPSDNVARLIGKHFIDTLPPTPGKQRPQKGCKVCRKRGIRRDTRYYCPKCPRNPGLCRKPCFEIYHTQLHY

SEQ ID NO: 45 - protein, 589 aa, Artificial Sequence
  Synthetic
MAKRFYSAEEAAAHCSASSSEEFSGSDSEYVPPASESDSSTEESWCSSSTVSALEEPMEVDEDVDDLEDQEAGDRADAAAGGEPAWGPPCNFPPEIPPFTTVPGVKVDTSNFEPINFFQLFMTEAILQDMVLYTNVYAEQYLTQNPLTRYARAHAWYPTDIAEMKRFVGLTLAMGLIKANSLESYWDTTTVLSIPVFGATMSRNRYQLLLRFLHFNNNATAVPPDQPGHDRLHKLRPLIDSLSERFANVYTPCQNICIDESLMLFKGRLQFRQYIPSKRARYGIKFYKLCESSTGYTSYFLIYEGKDSKLDPPGCPPDLTVSGKIVWELISPLLGQGFHLYVDNFYSSIPLFTALYCLNTPACGTINRNRKGLPRALLDKKLNRGETYALRKNELLAIKFFDKKNVFMLTSIHDESVIREQRVGRPPKNKPLCSKEYSKYMGGVDRTDQLQHYYNATRKTRHWYKKVGIYLIQMALRNSYIVYKAAVPGPKLSYYKYQLQILPALLFGGVEEQTVPEMPPSDNVARLIGKHFIDTLPPTPGKQRPQKGCKVCRKRGIRRDTRYYCPKCPRNPGLCRKPCFEIYHTQLHY

SEQ ID NO: 46 - protein, 589 aa, Artificial Sequence
  Synthetic
MAKRFYSAEEAAAHCSASSSDEFSGSDSEYVPPASESDSSTEESWCSSSTVSALEEPMEVDEDVDDLEDQEAGDRADAAAGGEPAWGPPCNFPPEIPPFTTVPGVKVDTSNFEPINFFQLFMTEAILQDMVLYTNVYAEQYLTQNPLTRGARAHAWYPTDIAEMKRFVGLTLAMGLIKANSLESYWDTTTVLSIPVFGATMSRNRYQLLLRFLHFNNNATAVPPDQPGHDRLHKLRPLIDSLSERFANVYTPCQNICIDESLMLFKGRLQFRQYIPSKRARYGIKFYKLCESSTGYTSYFLIYEGKDSKLDPPGCPPDLTVSGKIVWELISPLLGQGFHLYVDNFYSSIPLFTALYCLNTPACGTINRNRKGLPRALLDKKLNRGETYALRKNELLAIKFFDKKNVFMLTSIHDESVIREQRVGRKPKNKPLCSKEYSKYMGGVDRTDQLQHYYNATRKTRHWYKKVGIYLIQMALRNSYIVYKAAVPGPKLSYYKYQLQILPALLFGGVEEQTVPEMPPSDSVARLIGKHFIDTLPPTPGKQRPQKGCKVCRKRGIRRDTRYYCPKCPRNPGLCRKPCFEIYHTQLHY

SEQ ID NO: 47 - protein, 589 aa, Artificial Sequence
  Synthetic
MAKRFYSAEEAAAHCMASSSEEFSGSDSEYVPPASESDSSTEESWCSSSTVSALEEPMEVDEDVDDLEDQEAGDRADAAAGGEPAWGPPCNFPPEIPPFTTVPGVKVDTSNFEPINFFQLFMTEAILQDMVLYTNVYAEQYLTQNPLTRYARAHAWHPTDIAEMKRFVGLTLAMGLIKANSLESYWDTTTVLSIPVFGATMSRNRYQLLLRFLHFNNNATAVPPDQPGHDRLHKLRPLIDSLSERFANVYTPCQNICIDESLLLFKGRLQFRQYIPSKRARYGIKFYKLCESSSGYTSYFLIYEGKDSKLDPPGCPPDLTVSGKIVWELISPLLGQGFHLYVDNFYSSIPLFTALYCLNTPACGTINRNRKGLPRALLDKKLNRGETYALRKNELLAIKFFDKKNVFMLTSIHDESVIREQRVGRPPKNKPLCSKEYSKYMGGVDRTDQLQHYYNATRKTRHWYKKVGIYLIQMALRNSYIVYKAAVPGPKLSYYKYQLQILPALLFGGVEEQTVPEMPPSDNVARLIGKHFIDTLPPTPGKQRPQKGCKVCRKRGIRRDTRYYCPKCPRNPGLCRKPCFEIYHTQLHY

SEQ ID NO: 48 - protein, 589 aa, Artificial Sequence
  Synthetic
MAKRFYSAEEAAAHCMASSSEETSGSDSEYVPPASESDSSTEESWCSSSTVSALEEPMEVDEDVDDLEDQEAGDRADAAAGGEPAWGPPCNFPPEIPPFTTVPGVKVDTSNFEPINFFQLFMTEAILQDMVLYTNVYAEQYLTQNPLTRYARAHAWHPTDIAEMKRFVGLTLAMGLIKANSLESYWDTTTVLSIPVFSATMSRNRYQLLLRFLHFNNNATAVPPDQPGHDRLHKLRPLIDSLSERFAAVYTPCQNICIDESLLLFKGRLQFRQYIPSKRARYGIKFYKLCESSSGYTSYFLIYEGKDSKLDPPGCPPDLTVSGKIVWELISPLLGQGFHLYVDNFYSSIPLFTALYCLNTPACGTINRNRKGLPRALLDKKLNRGETYALRKNELLAIKFFDKKNVFMLTSIHDESVIREQRHGRPPKNKPLCSKEYSKYMGGVDRADQLQHYYNATRKTRHWYKKVGIYLIQMALRNSYIVYKAAVPGPKLSYYKYQLQILPALLFGGVEEQTVPEMPPSDNVARLIGKHFIDTLPPTPGKQRPQKGCKVCRKRGIRRDTRYYCPKCPRNPGLCRKPCFEIYHTQLHY

SEQ ID NO: 49 - protein, 589 aa, Artificial Sequence
  Synthetic
MAKRFYSAEEAAAHCMASSSEEFSGSDSEYVPPASESDSSTEESWCSSSTVSALEEPMEVDEDVDDLEDQEAGDRADAAAGGEPAWGPPCNFPPEIPPFTTVPGVKVDTSNFEPINFFQLFMTEAILQDMVLYTNVYAEQYLTQNPLTRYARAHAWHPTDIAEMKRFVGLTLAMGLIKANSLESYWDTTTVLSIPVFSATMSRNRYQLLLRFLHFNNEATAVPPDQPGHDRLHKLRPLIDSLSERFAAVYTPCQNICIDESLLLFKGRLQFRQYIPSKRARYGIKFYKLCESSSGYTSYFLIYEGKDSKLDPPGCPPDLTVSGKIVWELISPLLGQGFHLYVDNFYSSIPLFTALYCLNTPACGTINRNRKGLPRALLDKKLNRGETYALRKNELLAIKFFDKKNVFMLTSIHDESVIREQRVGRPPKNKPLCSKEYSKYMGGVDRTDQLQHYYNATRKTRHWYKKVGIYLIQMALRNSYIVYKAAVPGPKLSYYKYQLQILPALLFGGVEEQTVPEMPPSDNVARLIGKHFIDTLPPTPGKQRPQKGCKVCRKRGIRRDTRYYCPKCPRNPGLCRKPCFEIYHTQLHY

SEQ ID NO: 50 - protein, 589 aa, Artificial Sequence
  Synthetic
MAKRFYSAEEAAAHCMASSSEEFSGSDSEYVPPASESDSSTEESWCSSSTVSALEEPMEVDEDVDDLEDQEAGDRADAAAGGEPAWGPPCNFPPEIPPFTTVPGVKVDTSNFEPINFFQLFMTEAILQDMVLYTNVYAEQYLTQNPLTRYARAHAWHPTDIAEMKRFVGLTLAMGLIKANSLESYWDTTTVLSIPVFSATMSRNRYQLLLRFLHFNNNATAVPPDQPGHDRLHKLRPLIDSLSERFAAVYTPCQNICIDESLLLFKGRLQFRQYIPSKRARYGIKFYKLCESSSGYTSYFLIYEGKDSKLDPPGCPPDLTVSGKIVWELISPLLGQGFHLYVDNFYSSIPLFTALYCLNTPACGTINRNRKGLPRALLDKKLNRGETYALRKNELLAIKFFDKKNVFMLTSIHDESVIREQRVGRPPKNKPLCSKEYSKYMGGVDRTDQLQHYYNATRKTRAWYKKVGIYLIQMALRNSYIVYKAAVPGPKLSYYKYQLQILPALLFGGVEEQTVPEMPPSDNVARLIGKHFIDTLPPTPGKQRPQKGCKVCRKRGIRRDTRYYCPKCPRNPGLCRKPCFEIYHTQLHY

SEQ ID NO: 51 - protein, 589 aa, Artificial Sequence
  Synthetic
MAKRFYSAEEAAAHCMASSSEEFSGSDSEYVPPASESDSSTEESWCSSSTVSALEEPMEVDEDVDDLEDQEAGDRADAAAGGEPAWGPPCNFPPEIPPFTTVPGVKVDTSNFEPINFFQLFMTEAILQDMVLYTNVYAEQYLTQNPLTRYARAHAWHPTDIAEMKRFVGLTLAMGLIKANSLESYWDTTTVLSIPVFSATMSRNRYQLLLRFLHFNNNATAVPPDQPGHDRLHKLRPLIDSLSERFAAVYTPCQNICIDESLLLFKGRLQFRQYIPSKRARYGIKFYKLCESSSGYTSYFLIYEGKDSKLDPPGCPPDLTVSGKIVWELISPLLGQGFHLYVDNFYSSIPLFTALYCLNTPACGTINRNRKGLPRALLDKKLNRGETYALRKNELLAIKFFDKKNVFMLTSIHDESVIREQRVGRPPKNKPLCSKEYSKYMGGVDRTDQLQHYYNATRKTRHWYKKVGIYLIQMALRNSYIVYKAAVPGPKLSYYKYQLQILPALLFGGVEEQTVPEMPPSDNVARLIGKHFIDTLPPTPGKQRPQKGCKVCRKRGIRRDTRYYCPKCPRNPGLCRKPCFEIYHTQLHY

SEQ ID NO: 52 - protein, 589 aa, Artificial Sequence
  Synthetic
MAKRFYSAEEAAAHCMASSSEEFSGSDSEYVPPASESDSSTEESWCSSSTVSALEEPMEVDEDVDDLEDQEAGDRADAAAGGEPAWGPPCNFPPEIPPFTTVPGVKVDTSNFEPINFFQLFMTEAILQDMVLYTNVYAEQYLTQNPLPRYARAHAWHPTDIAEMKRFVGLTLAMGLIKANSLESYWDTTTVLKIPVFSATMSRNRYQLLLRFLHFNNNATAVPPDQPGHDRLHKLRPLIDSLSERFAAVYTPCQNICIDESLLLFKGRLQFRQYIPSKRARYGIKFYKLCESSSGYTSYFLIYEGKDSKLDPPGCPPDLTVSGKIVWELISPLLGQGFHLYVDNFYSSIPLFTALYCLNTPACGTINRNRKGLPRALLDKKLNRGETYALRKNELLAIKFFDKKNVFMLTSIHDESVIREQRVGRPPKNKPLCSKEYSKYMGGVDRTDQLQHYYNATRKTRHWYKKVGIYLIQMALRNSYIVYKAAVPGPKLSYYKYQLQILPALLFGGVEEQTVPEMPPSDNVARLIGKHFIDTLPPTPGKQRPQKGCKVCRKRGIRRDTRYYCPKCPRNPGLCFKPCFEIYHTQLHY

SEQ ID NO: 53 - protein, 589 aa, Artificial Sequence
  Synthetic
MAKRFYSAEEAAAHCMASSSEEFSGSDSEYVPPASESDSSTEESWCSSSTVSALEEPMEVDEDVDDLEDQEAGDRADAAAGGEPAWGPPCNFPPEIPPFTTVPGVKVDTSNFEPINFFQLFMTEAILQDMVLYTNVYAEQQLTQNPLPRYARAHAWHPTDIAEMKRFVGLTLAMGLIKANSLESYWDTTTVLSIPVFSATMSRNRYQLLLRFLHFNNNATAVPPDQPGHDRLHKLRPLIDSLSERFAAVYTPCQNICIDESLLLFKGRLQFRQYIPSKRARYGIKFYKLCESSSGYTSYFLIYEGKDRKLDPPGCPPDLTVSGKIVWELISPLLGQGFHLYVDNFYSSIPLFTALYCLDTPACGTINRNRKGLPRALLDKKLNRGETYALRKNELLAIKFFDKKNVFMLTSIHDESVIREQRVGRPPKNKPLCSKEYSKYMGGVDRTDQLQHYYNATRKTRAWYKKVGIYLIQMALRNSYIVYKAAVPGPKLSYYKYQLQILPALLFGGVEEQTVPEMPPSDNVARLIGKHFIDTLPPTPGKQRPQKGCKVCRKRGIRRDTRYYCPKCPRNPGLCFKPCFEIYHTQYHY

SEQ ID NO: 54 - protein, 589 aa, Artificial Sequence
  Synthetic
MAKRFYSAEEAAAHCMASSSEEPSGSDSEYVPPASESDSSTEESWCSSSTVSALEEPMEVDEDVDDLEDQEAGDRADAAAGGEPAWGPPCNFPPEIPPFTTVPGVKVDTSNFEPINFFQLFMTEAILQDMVLYTNVYAEQYLTQNPLPRYARAHAWHPTDIAEMKRFVGLTLAMGLIKANSLESYWDTTTVLSIPVFSATMSRNRYQLLLRFLHFNNNATAVPPDQPGHDRLHKLRPLIDSLSERFAAVYTPCQNICIDESLLLFKGRLQFRQYIPSKRARYGIKFYKLCESSSGYTSYFLIYEGKDSKLDPPGCPPDLTVSGKIVWELISPLLGQGFHLYVDNFYSSIPLFTHLYCLDTPACGTINRNRKGLPRALLDKKLNRGETYALRKNELLAIKFFDKKNVFMLTSIHDESVIREQRVGRPPKNKPLCSKEYSKYMGGVDRTDQLQHYYNATRKTRAWYKKVGIYLIQMALRNSYIVYKAAVPGPKLSYYKYQLQILPALLFGGVEEQTVPEMPPSDNVARLIGKHFIDTLPPTPGKQRPQKGCKVCRKRGIRRDTRYYCPKCPRNPGLCFKPCFEIYHTQYHY

SEQ ID NO: 55 - protein, 592 aa, Artificial Sequence
  Synthetic
MAKRFYSAEEAAAHCMASSQEEFSGSDSEYVPPASESDSSTEESWCSSSTVSALEEPMEVDEDVDDLEDQEAGDRVDAAAGGEPAWGPPCNFPPEIPPFTTVPGVKVDTSNFEPINFFQLFMTEAILQDMVLYTNVYAEQYLTQNPLPRYARAHAWHPTDIAEMKRFVGLTLAMGLIKKNSLESYWDTTTVLSIPVFSATMSRNRYQLLLRFLHFNNNATAVPPDQPGHDRLHKLRPLIDSLSERFAAVYTPCQNICIDESLLLFKGRLQFRQYIPSKRARYGIKFYKLCESSSGYTSYFLIYEGKDSKLDPPGCPPDLTVSGKIVWELISPLLGQGFHLYVDNFYSSIPLFTALYCLDTPACGTINRNRKGLPRALLDKKLNRGETYALRKNELLAIKFFDKKNVFMLTSIHDESVIREQRVGRPPKNKPLCSKEYSKYMGGVDRTDQLQHYYNATRKTRAWYKKVGIYLIQMALRNSYIVYKAAVPGPKLSYYKYQLQILPALLFGGVEEQTVPEMPPSDNVARLIGKHFIDTLPPTPGKQRPQKGCKVCRKRGIRRDTRYYCPKCPRNPGLCFKPCFEIYHTQLHYGRR

SEQ ID NO: 56 - protein, 592 aa, Artificial Sequence
  Synthetic
MAKRFYSAEEAAAHCMASSSEEFSGSDSEYVPPASESDSSTEESWCSSSTVSALEEPMEVDEDVDDLEDQEAGDRADAAAGGEPAWGPPCNFPPEIPPFTTVPGVKVDTSNFEPINFFQLFMTEAILQDMVLYTNVYAEQYLTQNKLPRYARAHAWHPTDIAEMKRFVGLTLAMGLIKANSLESYWDTGTVHSIPVFSATMSRNRYQLLLRFLHFNNNATAVPPDQPGHDRLHKLRPLIDSLSERFAAVYTPCQNICIDESLLLFKGRLQFRQYIPSKRARYGIKFYKLCESSSGYTSYFLIYEGKDSKLDPPGCPPDLTVSGKIVWELISPLLGQGFHLYVDNFYSSIPLFTALYCLDTPACGTINRNRKGLPRALLDKKLNRGETYALRKNELLAIKFFDKKNVFMLTSIHDESVIREQRVGRPPKNKPLCSKEYSKYMGGVDRTDQLQHYYNATRKTRAWYKKVGIYLIQMALRNSYIVYKAAVPGPKLSYYKYQLQILPALLFGGVEEQTVPEMPPSDNVARLIGKHFIDTLPPTPGKQRPQKGCKVCRKRGIRRDTRYYCPKCPRNPGLCFKPCFEIYHTQLHYGRR

SEQ ID NO: 57 - protein, 592 aa, Artificial Sequence
  Synthetic
MAKRFCSAEEAAAHCMASSSEEFSGSDSEYVPPASESDSSTEESWCSSSTVSALEEPMEVDEDVDDLEDQEAGDRADAAAGGEPAWGPPCNFPPEIPPFTTVPGVKVDTSNFEPINFFQLFMTEAILQDMVLYTNVYAEQYLTQNPLTRYARAHAWHPTDIAEMKRFVGLTLAMGLIKANSLESYWDTTTVLSIPVFSATMSRNRYQLLLRFLHFNNNATAVPPDQPGHDRLHKLRPLIDSLSERFAAVYTPCQNICIDESLLLFKGRLQFRQYIPSKRARYGIKFYKLCESSSGYTSYFLIYEGKDSKLDPPGCPPDLTVSGKIVWELISPLLGQGFHLYVDNFYSSIPLFTALYCLDTPACGTINRNRKGLPRALLDKKLNRGETYALRKNELLAIKFFDKKNVFMLTSIHDESVIREQRVGRPPKNKPLCSKEYSKYMGGVDRTDQLQHYYNATRKTRAWYKKVGIYLIQMALRNSYIVYKAAVPGPKLSYYKYQLQILPALLFGGVEEQTVPEMPPSDNVARLIGKHFIATLPPTPGKQRPQKGCKVCRKRGIRRDTRYYCPKCPRNPGLCFKPCFEIYHTQLHYGRR

SEQ ID NO: 58 - protein, 592 aa, Artificial Sequence
  Synthetic
MAKRFYSAEEAAAHCMASSSEEFSGSDSEYVPPASESDSSTEESWCSSSTVSALEEPMEVDEDVDDLEDQEAGDRADAAAGGEPAWGPPCNFPPEIPPFTTVPGVKVDTSNFEPINFFQLFMTEAILQDMVLYTNVYAEQYLTQVPLTRYARAHAWHPTDIAEMKRFVGLTLAMGLIKKNSLESYWDTTTVLSIPVFSATMSRNRYQLLLRFLHFNNNATAVPPDQPGHDRLHKLRPLIDSLSERFAAVYTPCQNICIDESLLLFKGRLQFRQYIPSKRARYGIKFYKLCESSSGYTSYFLIYEGKDSKLDPPGCPPDLTVSGKIVWELISPLLGQGFHLYVDNFYSSIPLFTALYCLDTPACGTINRNRKGLPRALLDKKLNRGETYALRKNELLAIKFFDKKNVFMLTSIHDESVIREQRVGRPPKNKPLCSKEYSKYMGGVDRTDQLQHYYNATRKTRAWYKKVGIYLIQMALRNSYIVYKAAVPGPKLSYYKYQLQILPALLFGGVEEQTVPEMPPSDNVARLIGKHFIDTLPPTPGKQRPQKGCKVCRKRGIRRDTRYYCPKCPRNPGLCFKPCFEIYHTQLHYGRR

SEQ ID NO: 59 - protein, 592 aa, Artificial Sequence
  Synthetic
MAKRFYSAEEAAAHCMASSSEEFSGSDQEYVPPASESDSSTEESWCSSSTVSALEEPMEVDEDVDDLEDQEAGDRADAAAGGEPAWGPPCNFPPEIPPFTTVPGVKVDTSNFEPINFFQLFMTEAILQDMVLYTNVYAEQYLTQNKLTRYARAHAWHPTDIAEMKRFVGLTLAMGLIKANSLESYWDTTTVLSIPVFSATMSRNRYQLLLRFLHFNNNATAVPPDQPGHDRLHKLRPLIDSLSERFAAVYTPCQNICIDESLLLFKGRLQFRQYIPSKRARYGIKFYKLCESSSGYTSYFLIYEGKDSKLDPPGCPPDLTVSGKIVWELISPLLGQGFHLYVDNFYSSIPLFTALYCLDTPACGTINRNRKGLPRALLDKKLNRGETYALRKNELLAIKFFDKKNVFMLTSIHDESVIREQRVGRPPKNKPLCSKEYSKYMGGVDRTDQLQHYYNATRKTRAWYKKVGIYLIQMALRNSYIVYKAAVPGPKLSYYKYQLQILPALLFGGVEEQTVPEMPPSDNVARLIGKHFIDTLPPTPGKQRPQKGCKVCRKRGIRRDTRYYCPKCPRNPGLCFKPCFEIYHTQLHYGRR

SEQ ID NO: 60 - protein, 592 aa, Artificial Sequence
  Synthetic
MAKRFYSAEEAAAHCMASSSEEFSGSDSEYVPPASESDSSTEESWCSSSTVSALEEPMEVDEDVDDLEDQEAGDRADAAAGGEPAWGPPCNFPPEIPPFTTVPGVKVDTSNFEPINFFQLFMTEAILQDMVLYTNVYAEQYLTQNVLPRYARAHAWHPTDIAEMKRFVGLTLAMGLIKANSLESYWDTTTVLSIPVFSATMSRNRYQLLLRFLHFNNDATAVPPDQPGHDRLHKLRPLIDSLTERFAAVYTPCQNICIDESLLLFKGRLQFRQYIPSKRARYGIKFYKLCESSSGYTSYFLIYEGKDSKLDPPGCPPDLTVSGKIVWELISPLLGQGFHLYVDNFYSSIPLFTALYCLDTPACGTINRNRKGLPRALLDKKLNRGETYALRKNELLAIKFFDKKNVFMLTSIHDESVIREQRVGRPPKNKPLCSKEYSKYMGGVDRTDQLQHYYNATRKTRAWYKKVGIYLIQMALRNSYIVYKAAVPGPKLSYYKYQLQILPALLFGGVEEQTVPEMPPSDNVARLIGKHFIDTLPPTPGKQRPQKGCKVCRKRGIRRDTRYYCPKCPRNPGLCFKPCFEIYHTQLHYGRR

SEQ ID NO: 61 - protein, 592 aa, Artificial Sequence
  Synthetic
MAKRFYSAEEAAAHCMASSSEEFSGSDSEYVPPASESDSSTEESWCSSSTVSALEEPMEVDEDVDDLEDQEAGDRADAAPGGEPAWGPPCNFPPEIPPFTTVPGVKVDTSNFEPINFFQLFMTEAILQDMVLYTNVYAEQYLTQVPLPRYARAHAWHPTDIAEMKRFVGLTLAMGLIKANSLESYWDTTTVLSIPVFSATMSRNRYQLLLRFLHFNNEATAVPPDQPGHDRLHKLRPLIDSLSERFAAVYTPCQNICIDESLLLFKGRLQFRQYIPSKRARYGIKFYKLCESSSGYTSYFLIYEGKDSKLDPPGCPPDLTVSGKIVWELISPLLGQGFHLYVDNFYSSIPLFTALYCLDTPACGTINRNRKGLPRALLDKKLNRGETYALRKNELLAIKFFDKKNVFMLTSIHDESVIREQRVGRPPKNKPLCSKEYSKYMGGVDRTDQLQHYYNATRKTRAWYKKVGIYLIQMALRNSYIVYKAAVPGPKLSYYKYQLQILPALLFGGVEEQTVPEMPPSDNVARLIGKHFIDTLPPTPGKQRPQKGCKVCRKRGIRRDTRYYCPKCPRNPGLCFKPCFEIYHTQLHYGRR

SEQ ID NO: 62 - protein, 592 aa, Artificial Sequence
  Synthetic
MAKRFYSAEEAAAHCMASSSEEFSGSDSEYVPPASESDSSTEESWCSSSTVSALEEPMEVDEDVDDLEDQEAGDRVDAAAGGEPAWGPPCNFPPEIPPFTTVPGVKVDTSNFEPINFFQLFMTEAILQDMVLYTNVYAEQYLTQNPLPRYARAHAWHPTDIAEMKRFVGLTLAMGLIKANSLESYWDTTTVLSIPVFSATMSRNRYQLLLKFLHFNNEATAVPPDQPGHDRLHKLRPLIDSLSERFAAVYTPCQNICIDESLLLFKGRLQFRQYIPSKRARYGIKFYKLCESSSGYTSYFLIYEGKDSKLDPPGCPPDLTVSGKIVWELISPLLGQGFHLYVDNFYSSIPLFTALYCLDTPACGTINRNRKGLPRALLDKKLNRGETYALRKNELLAIKFFDKKNVFMLTSIHDESVIREQRVGRPPKNKPLCSKEYSKYMGGVDRTDQLQHYYNATRKTRAWYKKVGIYLIQMALRNSYIVYKAAVPGPKLSYYKYQLQILPALLFGGVEEQTVPEMPPSDNVARLIGKHFIDTLPPTPGKQRPQKGCKVCRKRGIRRDTRYYCPKCPRNPGLCFKPCFEIYHTQLHYGRR

SEQ ID NO: 63 - protein, 592 aa, Artificial Sequence
  Synthetic
MAKRFYSAEEAAAHCMASSSEEFSGSDSEYVPPASESDSSTEESWCSSSTVSALEEPMEVDEDVDDLEDQEAGDRADAAAGGEPAWGPPCNFPPEIPPFTTVPGVKVDTSNFEPINFFQLFMTEAILQDMVLYTNVYAEQYLTQVPLPRYARAHAWHPTDIAEMKRFVGLTLAMGLIKANSLESYWDTTTVLNIPVFSATMSRNRYQLLLRFLEFNNNATAVPPDQPGHDRLHKLRPLIDSLSERFAAVYTPCQNICIDESLLLFKGRLQFRQYIPSKRARYGIKFYKLCESSSGYTSYFLIYEGKDSKLDPPGCPPDLTVSGKIVWELISPLLGQGFHLYVDNFYSSIPLFTALYCLDTPACGTINRNRKGLPRALLDKKLNRGETYALRKNELLAIKFFDKKNVFMLTSIHDESVIREQRVGRPPKNKPLCSKEYSKYMGGVDRTDQLQHYYNATRKTRAWYKKVGIYLIQMALRNSYIVYKAAVPGPKLSYYKYQLQILPALLFGGVEEQTVPEMPPSDNVARLIGKHFIDTLPPTPGKQRPQKGCKVCRKRGIRRDTRYYCPKCPRNPGLCFKPCFEIYHTQLHYGRR

SEQ ID NO: 64 - protein, 610 aa, Artificial Sequence
  Synthetic
MDIERQEERIRAMLEEELSDYSDESSSEDETDHCSEHEVNYDTEEERIDSVDVPSNSRQEEANAIIANESDSDPDDDLPLSLVRQRASASRQVSGPFYTSKDGTKWYKNCQRPNVRLRSENIVTEQAQVKNIARDASTEYECWNIFVTSDMLQEILTHTNSSIRHRQTKTAAENSSAETSFYMQETTLCELKALIALLYLAGLIKSNRQSLKDLWRTDGTGVDIFRTTMSLQRFQFLQNNIRFDDKSTRDERKQTDNMAAFRSIFDQFVQCCQNAYSPSEFLTIDEMLLSFRGRCLFRVYIPNKPAKYGIKILALVDAKNFYVVNLEVYAGKQPSGPYAVSNRPFEVVERLIQPVARSHRNVTFDNWFTGYELMLHLLNEYRLTSVGTVRKNKRQIPESFIRTDRQPNSSVFGFQKDITLVSYAPKKNKVVVVMSTMHHDNSIDESTGEKQKPEMITFYNSTKAGVDVVDELCANYNVSRNSKRWPMTLFYGVLNMAAINACIIYRTNKNVTIKRTEFIRSLGLSMIYEHLHSRNKKKNIPTYLRQRIEKQLGEPSPRHVNVPGRYVRCQDCPYKKDRKTKRSCNACAKPICMEHAKFLCENCAELDSSL

SEQ ID NO: 65 - protein, 610 aa, Artificial Sequence
  Synthetic
MDIERQEERIRAMLEEELSDYSDESSSEDETDHCSEHEVNYDTEEERIDSVDVPSNSRQEEANAIIANESDSDPDDDLPLSLVRQRASASRQVSGPFYTSKDGTKWYKNCQRPNVRLRSENIVTEQAQVKNIARDASTEYECWNIFVTSDMLQEILTHTNSSIRWRQTKTAAENSSAETSFYMQETTLCELKALIGLLYIAGLIKSNRQSLKDLWRTDGTGVDIFRTTMSLQRFQFLLNNIRFDDKSTRDERKQTDNMAAFRSIFDQFVQSCQNAYSPSEFLTIDEMLLSFRGRCLFRVYIPNKPAKYGIKILALVDAKNFYVHNLEVYAGKQPSGPYAVSNRPFEVVERLIQPVARSHRNVTFDNWFTGYEVMLHLLNEYRLTSVGTVRKNKRQIPESFIRTDRQPNSSVFGFQKDITLVSYAPKKNKVVVVMSTMHHDNSIDESTGEKQKPEMITFYNSTKAGVDVVDELCANYNVSRNSKRWPMTLFYGVLNMAAINACIIYRTNKNVTIKRTEFIRSLGLSMIYEHLHSRNKKKNIPTYLRQRIEKQLGEPSPRHVNVPGRYVRCQDCPYKKDRKTKRSCNACAKPICMEHAKFLCENCAHLDSSL

SEQ ID NO: 66 - protein, 610 aa, Artificial Sequence
  Synthetic
MDIERQEERIRAMLEEELSDYSDESSSEDETDHCSEHEVNYDTEEERIDSVDVPSNSRQEEANAIIANESDSDPDDDLPLSLVRERASASRQVSGPFYTSKDGTKWYKNCQRPNVRLRSENIVTEQAQVKNIARDASTEYECWNIFVTSDMLQEILTHTNSSIRWRQTKTAAENSSAETSFYMQETTLCELKALIGLLYIAGLIKSNRQSLKDLWRTDGTGVDIFRTTMSLQRFQFLQNNIRFDDKSTRDERKQTDNMAAFRSIFDQFVQSCQNAYSPSEFLTIDEMLLSFRGRCLFRVYIPNKPAKYGIKILALVDAKNFYVKNLEVYAGKQPSGPYAVSNRPFEVVERLIQPVARSHRNVTFDNWFTGYELMLHLLNEYRLTSVGTVRKNKRQIPESFIRTDRQPNSSVFGFQKDITLVSYAPKKNKVVVVMSTMHHDNSIDESTGEKQKPEMITFYNSTKAGVDVVDELQANYNVSRNSKRWPMTLFYGVLNMAAINACIIYRTNKNVTIKRTEFIRSLGLSMIKEHLHSRNKKKNIPTYLRQRIEKQLGEPSPRHVNVPGRYVRCQDCPYKKDRKTKRSCNACAKPICMEHAKFLCENCAELDSSI

SEQ ID NO: 67 - protein, 610 aa, Artificial Sequence
  Synthetic
MDIERQEERIRAMLEEELSDYSDESSSEDETDHCSEHEVNYDTEEERIDSVDVPSNSRQEEANAIIANESDSDPDDDLPLSLVRQRASASRAVSGPFYTSKDGTKWYKNCQRPNVRLRSENIVTEQAQVKNIARDASTEYECWNIFVTSDMLQEILTHTNSSIRHRQTKTAAENSSAETSFYMQETTLCELKALIGLLYIAGLIKSNRQSLKDLWRTDGTGVDIFRTTMSLQRFQFLLNNIRFDDKSTRDERKQTDNMAAFRSIFDQFVQSCQNAYSPSEFLTIDEMLLSFRGRCLFRVYIPNKPAKYGIKILALVDAKNFYVKNLEVYAGKQPSGPYAVSNRPFEVVERLIQPVARSHRNVTFDNWFTGYELMLHLLNEYRLTSVGTVRKNKRQIPESFIRTDRQPNSSVFGFQKDITLVSYAPKKNKVVVVMSTMHHDNSIDESTGEKQKPEMITFYNSTKAGVDVVDELCANYNVSRNSKRWPMTLFYGVLNMAAINACIIYRCNKNVTIKRTEFIRSLGLSMIYEHLHSRNKKKNIPTYLRQRIEKQLGEPSPRHVNVPGRYVRCQDCPYKKDRKTKRSCNACAKPICMEHAKFLCENCAELDSSL

SEQ ID NO: 68 - protein, 610 aa, Artificial Sequence
  Synthetic
MDIERQEERIRAMLEEELSDYSDESSSEDETDHCSEHEVNYDTEEERIDSVDVPSNSRQEEANAIIANESDSDPDDDLPLSLVRQRASASRQMSGPHYTSKDGTKWYKNCQRPNVRLRSENIVTEQAQVKNIARDASTEYECWNIFVTSDMLQEILTHTNSSIRWRQTKTAAENSSASTSFYMQETTLCELKALIGLLYIAGLIKSNRQSLKDLWRTDGTGVDIFRTTMSLQRFQFLQNNIRFDDKSTRDERKQTDNMAAFRSIFDQFVQSCQNAYSPSEFLTIDEMLLSFRGRCLFRVYIPNKPAKYGIKILALVDAKNFYVKNLEVYAGKQPSGPYAVSNRPFEVVERLIQPVARSHRNVTFDNWFTGYELMLHLLNEYRLTSVGTVRKNKRQIPESFIRTDRQPNSSVFGFQKDITLVSYAPKKNKVVVVMSTMHHDNSIDESTGEKQKPEMITFYNSTKAGVDVVDELCANYNVSRNSKRWPMTLFYGVLNMAAINACIIYRTNKNVTIKRTEFIRSLGLSMIYEHLHSRNKKKNIPTYLRQRIEKQLGEPSPRHVNVPGRYVRCQDCPYKKDRKTKRSCNACAKPICMEHAKFLCENCAELDSHL

SEQ ID NO: 69 - protein, 610 aa, Artificial Sequence
  Synthetic
MDIERQEERIRAMLEEELSDYSDESSSEDETDHCSEHEVNYDTEEERIDSVDVPSNSRQEEANAIIANESDSDPDDDLPLSLVRQRASASRQVSGPFYTSKDGTKWYKNCQRPNVRLRSENIVTEQAQVKNIARDASTEYECWNIFVTSDMLQEILTHTNSSIRWRQTKTAAENSSASTSFYMQETTLCELKALIGLLYIAGLIKSNRQSLKDLWRTDGTGVDIFRTTMSLQRFQFLLNNIRFDDKSTRDERKQTDNMAAFRSIFDQFVQSCQNAYSPSEFLTIDEMLLSFRGRCLFRVYIPNKPAKYGIKILALVDAKNFYVKNLEVYAGKQPSGPYAVSNRPFEVVERLIQPVARSHRNVTFDNWFTGYELMLHLLNEYRLTSVGTVRKNKRQIPESFIRTDRQPNSSVFGFQKDITLVSYAPKKNKVVVVMSTMHHDNSIDESTGEKQKPEMITFYNSTKAGVDVVDELCANYNVSRNSKRWPMTLFYGVLNMAAINACIIYRTNKNVTIKRTEFIRSLGLSMIYEHLHSRNKKKNIPTYLRQRIAMQLGEPSPRHVNVPGRYVRCQDCPYKKDRKTKRSCNACAKPICMEHAKFLCENCAELDSSL

SEQ ID NO: 70 - protein, 610 aa, Artificial Sequence
  Synthetic
MDIERQEERIRAMLEEELSDYSDESSSEDETDHCSEHEVNYDTEEERIDSVDVPSNSRQEEANAIIANESDSDPDDDLPLSLVRQRASASRQVSGPFYTSKDGTKWYKNCQRPNVRLRSENIVTEQAQVKNIARDASTEYECWNIFVTSDMLQEILTHTNSSIRWRQTKTAAENSSAETSFYMQETTLCELKALIGLLYIAGLIKSNRQSLKDLWRTDGTGVDIFRTTMSLQRFQFLLNNIRFDDKSTRDERKQTDNMAAFRSIFDQFVQSCQNAYSPSEFLTIDEMLLSFRGRCLFRVYIPNKPAKYGIKILALVDAKNFYVKNLEVYAGKQPSGPYAVSNRPFEVVERLIQPVARSHRNVTFDNWFTGYELMLHLLNEYRLTSVGTVRKNKTQIPENFIRTDRQPNSSVFGFQKDITLVSYAPKKNKVVVVMSTMHHDNSIDESTGEKQKPEMITFYNSTKAGVDVVDELQANYNVSRNSKRWPMTLFYGVLNMAAINACIIYRTNKNVTIKRTEFIRSLGLSMIYEHLHSRNKKKNIPTYLRQRIEKQLGEPSPRHVNVPGRYVRCQDCPYKKDRKTKRSCNACAKPICMEHAKFLCENCAELDSSL

SEQ ID NO: 71 - protein, 610 aa, Artificial Sequence
  Synthetic
MDIERQEERIRAMLEEELSDYSDESSSEDETDHCSEHEVNYDTEEERIDSVDVPSNSRQEEANAIIANESDSDPDDDLPLSLVRQRASASRQVSGPFYTSKDGTKWYKNCQRPNVRLRSENIVTEQAQVKNIARDASTEYECWNIFVTSDMLQEILTHTNSSIRWRQTKTAAENSSAETSFYMQETTLCELKALIGLLYLAGLIKSNRQSLKDLWRTDGTGVDIFRTTMSLQRFQFLQNNIRFDDKSTRDERKQTDNMAAFRSIFDQFVQSCQNAYSPSEFLTIDEMLLSFRGRCLFRVYIPNKPAKYGIKILALVDAKNFYVVNLEVYAGKQPSGPYAVSNRPFEVVERLIQPVARSHRNVTFDNWFTGYELMLHLLNEYRLTSVGTVRKNKRQIPESFIRTDRQPNSSVFGFQKDITLVSYAPKKNKVVVVMSTMHHDNSIDESTGEKQKPEMITFYNSTKAGVDVVDELQANYNVSRNSKRWPMTLFYGVLNMAAINACIIYRTNKNVTIKRTEFIRSLGLSMIKEHLHSRNKKKNIPTYLRQRIEKQLGEPSPRHVNYPGRYVRCQDCPYKKDRKTKRSCNACAKPICMEHAKFLCENCAELDSSL

SEQ ID NO: 72 - protein, 610 aa, Artificial Sequence
  Synthetic
MDIERQEERIRAMLEEELSDYSDESSSEDETDHCSEHEVNYDTEEERIDSVDVPSNSRQEEANAIIANESDSDPDDDLPLSLVRQRASASRQVSGPFYTSKDGTKWYKNCQRPNVRLRSENIVTEQAQVKNIARDASTEYECWNIFVTSDMLQEILTHTNSSIRWRQTKTAAENSSAETSFYMQETTLCELKALIGLLYIAGLIKSNRQSLKDLWRTDGTGVDIFRTTMSLQRFQFLQNNIRFDDKSTRDERKQTDNMAAFRSIFDQFVQSCQNAYSPSEFLTIDEMLLSFRGRCLFRVYIPNKPAKYGIKILALVDAKNFYVKNLEVYAGKQPSGPYAVSNRPFEVVERLIQPVARSHRNVTFDNWFTGYELMLHLLNEYRLTSVGTVRKNKRQIPESFIRTDRQPNSSVFGFQKDITLVSYAPKKNKVVVVMSTMHHDNSIDESTGEKQKPEMITFYNSTKAGVDVVDELCANYNVSRNSKRWPMTLFYGVLNMAAINACIIYRTNKNVTIKRTEFIRSLGLSMIYEHLHSRNKKKNIPTYLRQRIEKQLGEPSPRHVNVPGRYVRCQDCPYKKDRKTKRSCNACAKPICMEHAKFLCENCAELDSSL

SEQ ID NO: 73 - protein, 610 aa, Artificial Sequence
  Synthetic
MDIERQEERIRAMLEEELSDYSDESSSEDETDHCSEHEVNYDTEEERIDSVDVPSNSRQEEANAIIANESDSDPDDDLPLSLVRQRASASRQVSGPFYTSKDGTKWYKNCQRPNVRLRSENIVTEQAQVKNIARDASTEYECWNIFVTSDMLQEILTHTNSSIRWRQTKTAAENSSAETSFYMQETTLCELKALIGLLYLAGLIKSNRQSLKDLWRTDGTGVDIFRTTMSLQRFQFLQNNIRFDDKSTRDERKQTDNMAAFRSIFDQFVQSCQNAYSPSEFLTIDEMLLSFRGRCLFRVYIPNKPAKYGIKILALVDAKNFYVVNLEVYAGKQPSGPYAVSNRPFEVVERLIQPVARSHRNVTFDNWFTGYELMLHLLNEYRLTSVGTVRKNKRQIPESFIRTDRQPNSSVFGFQKDITLVSYAPKKNKVVVVMSTMHHDNSIDESTGEKQKPEMITFYNSTKAGVDVVDELCANYNVSRNSKRWPMTLFYGVLNMAAINACIIYRTNKNVTIKRTEFIRSLGLSMIKEHLHSRNKKKNIPTYLRQRIEKQLGEPSPRHVNYPGRYVRCQDCPYKKDRKTKRSCNACAKPICMEHAKFLCENCAELHSSL

SEQ ID NO: 74 - protein, 610 aa, Artificial Sequence
  Synthetic
MDIERQEERIRAMLEEELSDYSDESSSEDETDHCSEHEVNYDTEEERIDSVDVPSNSRQEEANAIIANESDSDPDDDLPLSLVRQRASASRQVSGPFYTSKDGTKWYKNCQRPNVRLRSENIVTEQAQVKNIARDASTEYECWNIFVTSDMLQEILTHTNSSIRHRQTKTAAENSSAETSFYMQETTLCELKALIGLLYLAGLIKSNRQSLKDLWRTDGTGVDIFRTTMSLQRFQFLQNNIRFDDKSTRDERKQTDNMAAFRSIFDQFVQSCQNAYSPSEFLTIDEMLLSFRGRCLFRVYIPNKPAKYGIKILALVDAKNFYVKNLEVYAGKQPSGPYAVSNRPFEVVERLIQPVARSHRNVTFDNWFTGYELMLHLLNEYRLTSVGTVRKNKRQIPESFIRTSRQPNSSVFGFQKDITLVSYAPKKNKVVVVMSTMHHDNSIDESTGEKQKPEMITFYNSTKAGVDVVDELCANYNVSRNSKRWPMTLFYGVLNMAAINACIIYRTNKNVTIKRTEFIRSLGLSMIYEHLHSRNKKKNIPTYLRQRIEKQLGEPSPRHVNVPGRYVRCQDCPYKKDRKTKRSCNACAKPICMEHAKFLCENCAELDSSL

SEQ ID NO: 75 - protein, 610 aa, Artificial Sequence
  Synthetic
MDIERQEERIRAMLEEELSDYSDESSSEDETDHCSEHEVNYDTEEERIDSVDVPSNSRQEEANAIIANESDSDPDDDLPLSLVRQRASASRQVSGPFYTSKDGTKWYKNCQRPNVRLRSENIVTEQAQVKNIARDASTEYECWNIFVTSDMLQEILTHTNSSIRHRQTKTAAENSSAETSFYMQETTLCELKALIGLLYIAGLIKSNRQSLKDLWRTDGTGVDIFRTTMSLQRFQFLQNNIRFDDKSTRDERKQTDNMAAFRSIFDQFVQSCQNAYSPSEFLTIDEMLLSFRGRCLFRVYIPNKPAKYGIKILALVDAKNFYVKNLEVYAGKQPSGPYAVSNRPFEVVERLIQPVARSHRNVTFDNWFTGYELMLHLLNEYRLTSVGTVRKNKRQIPESFIRTDRQPNSSVFGFQKDITLVSYAPKKNKVVVVMSTMHHDNSIDESTGEKQKPEMITFYNSTKAGVDVVDELCANYNVSRNSKRWPMTLFYGVLNMAAINACIIYRTNKNVTIKRTEFIRSLGLSMIYEHLHSRNKKKNIPTYLRQRIEKQLGEPSPRHVNVPGRYVRCQDCPYKKDRKTKRSCNACAKPICMEHAKFLCENCAELDSSL

SEQ ID NO: 76 - protein, 610 aa, Artificial Sequence
  Synthetic
MDIERQEERIRAMLEEELSDYSDESSSEDETDHCSEHEVNYDTEEERIDSVDVPSNSRQEEANAIIANESDSDPDDDLPLSLVRQRASASRQVSGPFYTSKDGTKWYKNCQRPNVRLRSENIVTEQAQVKNIARDASTEYECWNIFVTSDMLQEILTHTNSSIRHRQTKTAAENSSAETSFYMQETTLCELKALIGLLYIAGLIKSNRQSLKDLYRTDGTGVDIFRTTMSLQRFQFLQNNIRFDDKSTRDERKQTDNMAAFRSIFDQFVQSCQNAYSPSEFLTIDEMLLSFRGRCLFRVYIPNKPAKYGIKILALVDAKNFYVVNLEVYAGKQPSGPYAVSNRPFEVVERLIQPVARSHRNVTFDNWFTGYELMLHLLNEYRLTSVGTVRKNKRQIPESFIRTDRQPNSSVFGFQKDITLVSYAPKKNKVVVVMSTMHHDNSIDESTGEKQKPEMITFYNSTKAGVDVVDELQANYNVSRNSKRWPMTLFYGVLNMAAINACIIYRTNKNVTIKRTEFIRSLGLSMIYEHLHSRNKKKNIPTYLRQRIEKQLGEPSPRHVNYPGRYVRCQDCPYKKDRKTKRSCNACAKPICMEHAKFLCENCAELDSSL

SEQ ID NO: 77 - protein, 610 aa, Artificial Sequence
  Synthetic
MDIERQEERIRAMLEEELSDYSDESSSEDETDHCSEHEVNYDTEEERIDSVDVPSNSRQEEANAIIANESDSDPDDDLPLSLVRQRASASRQVSGPFYTSKDGTKWYKNCQRPNVRLRSENIVTEQAQVKNIARDASTEYECWNIFVTSDMLQEILTHTNSSIRHRQTKTAAENSSAETSFYMQETTLCELKALIALLYIAGLIKSNRQSLKDLWRKDGTGVDIFRTTMSLQRFQFLLNNIRFDDISTRDERKQTDNMAAFRSIFDQFVQCCQNAYSPSEFLTIDEMLLSFRGRCLFRVYIPNKPAKYGIKILALVDAKNFYVHNLEVYAGKQPSGPYAVSNRPFEVVERLIQPVARSHRNVTFDNWFTGYELMLHLLNEYRLTSVGTVRKNKRQIPESFIRTDRQPNSSVFGFQKDITLVSYAPKKNKVVVVMSTMHHDNSIDESTGEKQKPEMITFYNSTKAGVDVVDELCANYNVSRNSKKWPMTLFYGVLNMAAINACIIYRTNKNVTIKRTEFIRSLGLSMIYEHLHSRNKKKNIPTYLRQRIEKQLGEPSPRHVNVPGRYVRCQDCPYKKDRKTKRSCNACAKPICMEHAKFLCENCAELDSSL

SEQ ID NO: 78 - protein, 610 aa, Artificial Sequence
  Synthetic
MDIERQEERIRAMLEEELSDYSDESSSEDETDHCSEHEVNYDTEEERIDSVDVPSNSRQEEANAIIANESDSDPDDDLPLSLVRQRASASRQVSGPFYTSKDGTKWYKNCQRPNVRLRSENIVTEQAQVKNIARDASTEYECWNIFVTSDMLQEILTHTNSSIRHRQTKTAAENSSAETSFYMQETTLCELKALIALLYIAGLIKSNRQSLKDLWRTDGTGVDIFRTTMSLQRFQFLINNIRFDDKSTRDERKQTDNMAAFRSIFDQFVQCCQNAYSPSEFLTIDEMLLSFRGRCLFRVYIPNKPAKYGIKILALVDAKNWYVVNLEVYAGKQPSGPYAVSNRPFEVVERLIQPVARSHRNVTFDNWFTGYELMLHLLNEYRLTSVGTVRKNKRQIPESFIRTDRQPNSSVFGFQKDITLVSYAPKKNKVVVVMSTMHHDNSIDESTGEKQKPEMITFYNSTKAGVDVVDELCANYNVSRNSKRWPMTLFYGVLNMAAINACIIYRTNKNVTIKRTEFIRSLGLSMIYEHLHSRNKKKNIPTYLRQRIEKQLGEPSPRHVNVPGRYVRCQDCPYKKDRKTKRSCNACAKPICMEHAKFLCENCAELDSSL

SEQ ID NO: 79 - protein, 610 aa, Artificial Sequence
  Synthetic
MDIERQEERIRAMLEEELSDYSDESSSEDETDHCSEHEVNYDTEEERIDSVDVPSNSRQEEANAIIANESDSDPDDDLPLSLVRQRASASRQVSGPFYTSKDGTKWYKNCQRPNVRLRSENIVTEQAQVKNIARDASTEYECWNIFVTSDMLQEILTHTNSSIRHRQTKTAAENSSAETSFYMQETTLCELKALIALLYLAGLIKSNRQSAKDLWRTDGTGVDIFRTTMSLQRFYFLQNNIRFDDKSTRDERKQTDNMAAFRSIFDQFVQCCQNAYSPSEFLTIDEMLLSFRGRCLFRVYIPNKPAKYGIKILALVDAKNFYVKNLEVYAGKQPSGPYAVSNRPFEVVERLIQPVARSHRNVTFDNWFTGYELMLHLLNEYRLTSVGTVRKNKRQIPESFIRTDRQPNSSVFGFQKDITLVSYAPKKNKVVVVMSTMHHDNSIDESTGEKQKPEMITFYNSTKAGVDVVDELCANYNVSRNSKRWPMTLFYGVLNMAAINACIIYRTNKNVTIKRTEFIRSLGLSMIYEHLHSRNKKKNIPTYLRQRIEKQLGEPSPRHVNVPGRYVRCQDCPYKKDRKTKRSCNACAKPICMEHAKFLCENCAELDSSL

SEQ ID NO: 80 - protein, 610 aa, Artificial Sequence
  Synthetic
MDIERQEERIRAMLEEELSDYSDESSSEDETDHCSEHEVNYDTEEERIDSVDVPSNSRQEEANAIIANESDSDPDDDLPLSLVRQRASASRQVSGPFYTSKDGTKWYKNCQRPNVRLRSENIVTEQAQVKNIARDASTEYECWNIFVTSDMLQEILTHTNSSIRHRQTKTAAENSSAETSFYMQETTLPELKALIALLYLAGLIKSNRQSLKDLWRTDGTGVDVFRTTMSLQRFQFLQNNIRFDDKSTRDERKQTDNMAAFRSIFDQFVQCCQNAYSPSEFLTIDEMLLSFRGRCLFRVYIPNKPAKYGIKILALVDAKNFYVVNLEVYVGKQPSGPYAVSNRPFEVVERLIQPVARSHRNVTFDNWFTGYELMLHLLNEYRLTSVGTVRKNKRQIPESFIRTDRQPNSSVFGFQKDITLVSYAPKKNKVVVVMSTMHHDNSIDESTGEKQKPEMITFYNSTKAGVDVVDELCANYNVSRNSKRWPMTLFYGVLNMAAINACIIYRTNKNVTIKRTEFIRSLGLSMIYEHLHSRNKKKNIPTYLRQRIEKQLGEPSPRHVNVPGRYVRCQDCPYKKDRKTKRSCNACAKPICMEHAKFLCENCAELDSSL

SEQ ID NO: 81 - protein, 610 aa, Artificial Sequence
  Synthetic
MDIERQEERIRAMLEEELSDYSDESSSEDETDHCSEHEVNYDTEEERIDSVDVPSNSRQEEANAIIANESDSDPDDDLPLSLVRQRASASRQVSGPFYTSKDGTKWYKNCQRPNVRLRSENIVTEQAQVKNIARDASTEYECWNIFVTSDMLQEILTHTNSSIRERQTKTAAENSSAETSFYMQETTLCELKALIALLYLAGLIKSNRQSLKDLWRTDGTGVDIFRTTMSLQRFQFLQNNIRFDDKSTRDERKQTDNMAAFRSIFDQFVQCCQNAYSPSEFLTIDEMLLSFRGRCLFRVYIPNKPAKYGIKILALVDAKNFYVKNLEVYVGKQPSGPYAVSNRPFEVVERLIQPVARSHRNVTFDNWFTGYELMLHLLNEYRLTSVGTVRKNKRQIPESFIRTDRQPNSSVFGFQKDITLVSYAPKKNKVVVVMSTMHHDNSIDESTGEKQKPEMITFYNSTKAGVDVVDELCANYNVSRNSKRWPMTLFYGVLNMAAINACIIYRTNKNVTIKRTEFIRSLGLSMIYEHLHSRNKKKNIPTYLRQRIEKQLGEPSPRHVNVPGRYVRCQDCPYKKDRKTKRSCNACAKPICMEHAKFLCENCAELDSSL

SEQ ID NO: 82 - protein, 610 aa, Artificial Sequence
  Synthetic
MDIERQEERIRAMLEEELSDYSDESSSEDETDHCSEHEVNYDTEEERIDSVDVPSNSRQEEANAIIANESDSDPDDDLPLSLVRQRASASRQVSGPFYTSKDGTKWYKNCQRPNVRLRSENIVTEQAQVKNIARDASTEYECWNIFVTSDMLQEILTHTNSSIRHRQTKTAAENSSAETSFYMQETTLCELKALIALLYLAGLIKSNRQSLKDLWRTDGTGVDIFRTTMSLQRFQFLQNNIRFDDISTRDERKQTDNMAAFRSIFDQFVQCCQNAYSPSEFLTIDEMLLSFRGRCLFRVYIPNKPAKYGIKILALVDAKNDYVVNLEVYAGKQPSGPYAVSNRPFEVVERLIQPVARSHRNVTFDNWFTGYELMLHLLNEYRLTSVGTVRKNKRQIPESFIRTDRQPNSSVFGFQKDITLVSYAPKKNKVVVVMSTMHHDNSIDESTGEKQKPEMITFYNSTKAGVDVVDELCANYNVSRNSKRWPMTLFYGVLNMAAINACIIYRTNKNVTIKRTEFIRSLGLSMIYEHLHSRNKKKNIPTYLRQRIEKQLGEPSPRHVNYPGRYVRCQDCPYKKDRKTKRSCNACAKPICMEHAKFLCENCAELDSSL

SEQ ID NO: 83 - protein, 610 aa, Artificial Sequence
  Synthetic
MDIERQEERIRAMLEEELSDYSDESSSEDETDHCSEHEVNYDTEEERIDSVDVPSNSRQEEANAIIANESDSDPDDDLPLSLVRQRASASRQVSGPFYTSKDGTKWYKNCQRPNVRLRSENIVTEQAQVKNIARDASTEYECWNIFVTSDMLQEILTHTNSSIRHRQTKTAAENSSAETSFYMQETTLCELKALIGLLYLAGLIKSNRQSLKDLYRTDGTGVDIFRTTMSLQRFGFLQNNIRFDDKSTRDERKQTDNMAAFRSIFDQFVQCCQNAYSPSEFLTIDEMLLSFRGRCLFRVYIPNKPAKYGIKILALVDAKNFYVVNLEVYAGKQPSGPYAVSNRPFEVVERLIQPVARSHRNVTFDNWFTGYELMLHLLNEYRLTSVGTVRKNKRQIPESFIRTDRQPNSSVFGFQKDITLVSYAPKKNKVVVVMSTMHHDNSIDESTGEKQKPEMITFYNSTKAGVDVVDELCANYNVSRNSKRWPMTLFYGVLNMAAINACIIYRTNKNVTIKRTEFIRSLGLSMIYEHLHSRNKKKNIPTYLRQRIEKQLGEPSPRHVNVPGRYVRCQDCPYKKDRKTKRSCNACAKPICMEHAKFLCENCAELDSSL

SEQ ID NO: 84 - protein, 610 aa, Artificial Sequence
  Synthetic
MDIERQEERIRAMLEEELSDYSDESSSEDETDHCSEHEVNYDTEEERIDSVDVPSNSRQEEANAIIANESDSDPDDDLPLSLVRQRASASRQVSGPFYTSKDGTKWYKNCQRPNVRLRSENIVTEQAQVKNIARDASTEYECWNIFVTSDMLQEILTHTNSSIRHRQTKTAAENSSAETSFYMQETTLCELKALIGLLYLAGLIKSNRQSLKDLWRTDGTGVDIFRTTMSLQRFQFLQNNIRFDDKSTRDERKQTDNMAAFRSIFDQFVQCCQNAYSPSEFLTIDEMLLSFRGRCLFRVYIPNKPAKYGIKILALVDAKNFYVVNLEVYAGKQPSGPYAVSNRPFEVVERLIQPVARSHRNVTFDNWFTGYELMLHLLNEYRLTSVGTVRKNKRQIPESFIRTDRQPNSSVFGFQKDITLVSYAPKKNKVVVVMSTMHHDNSIDESTGEKQKPEMITFYNSTKAGVDVVDELCANYNVSRNSKRWPMTLFYGVLNMAAINACIIYRTNKNVTIKRTEFIRSLGLSMIYEHLHSRNKKKNIPTILRQRIEKQLGEPSPRHVNVPGRYVRCQDCPYKKDRKTKRSCNACAKPICMEHAKFLCVNCAELDSSL

SEQ ID NO: 85 - protein, 610 aa, Artificial Sequence
  Synthetic
MDIERQEERIRAMLEEELSDYSDESSSEDETDHCSEHEVNYDTEEERIDSVDVPSNSRQEEANAIIANESDSDPDDDLPLSLVRQRASASRQVSGPFYTSKDGTKWYKNCQRPNVRLRSENIVTEQAQVKNIARDASTEYECWNIFVTSDMLQEILTHTNSSIRHRQTKTAAENSSAETSFYMQETTLCELKALIGLLYLAGLIKSNRQSLKDLWRTDGTGVDIFRTTMSLQRFQFLQNNIRFDDKSTRDERKQTDNMAAFRSIFDQFVQSCQNAYSPSEFLTIDEMLLSFRGRCLFRVYIPNKPAKYGIKILALVDAKNFYVVNLEVYAGKQPSGPYAVSNRPFEVVERLIQPVARSHRNVTFDNWFTGYELMLHLLNEYRLTSVGTVRKNKRQIPESFIRTDRQPNSSVFGFQKDITLVSYAPKKNKVVVVMSTMHHDNSIDESTGEKQKPEMITFYNSTKAGVDVVDELCANYNVSRNSKRWPMTLFYGVLNMAAINACIIYRTNKNVTIKRTEFIRSLGLSMIYEHLHSRNKKKNIPTYLRQRIEKQLGEPSPRHVNYPGRYVRCQDCPYKKDRKTKRSCNACAKPICMEHAKFLCENCAELDSSL

SEQ ID NO: 86 - protein, 610 aa, Artificial Sequence
  Synthetic
MDIERQEERIRAMLEEELSDYSDESSSEDETDHCSEHEVNYDTEEERIDSVDVPSNSRQEEANAIIANESDSDPDDDLPLSLVRQRASASRQVSGPFYTSKDGTKWYKNCQRPNVRLRSENIVTEQAQVKNIARDASTEYECWNIFVTSDMLQEILTHTNSSIRHRQTKTAAENSSAETSFYMQETTLCELKALIALLYLAGLIKSNRQSLKDLWRTDGTGVDIFRTTMSLQRFQFLQNNIRFDDKSTRDERKQTDNMAAFRSIFDQFVQCCQNAYSPSEFLTIDEMLLSFRGRCLFRVYIPNKPAKYGIKILALVDAKNFYVVNLEVYAGKQPSGPYAVSNRPFEVVERLIQPVARSHRNVTFDNWFTGYECMLHLLNEYRLTSVGTVRKNKRQIPESFIRTDRQPNSSVFGFQKDITLVSYAPKKNKVVVVMSTMHHDNSIDESTGEKQKPEMITFYNSTKAGVDVVDELCANYNVSRNSKRWPMTLFYGVLNMAAINACIIYRTNKNVTIKRTEFIRSLGLSMIYEHLHSRNKKKNIPTYLRQRIEMQLGEPSPRHVNVPGRYVRCQDCPYKKDRKTKRSCNACAKPICMEHAKFLCENCAELKSSL

SEQ ID NO: 87 - DNA, 1296 bp, Artificial Sequence
  Synthetic
cagcaggtgggccgcctactgcgcacgcgcgggtttgcgggcagccgcctgggctgtgggagcagcccgggcagagctctcctgcctctccaccagcccaccccgccgcctgaccgccccctccccaccccccaccccccacccccggaaaacgcgtcgtcccctgggctgggtggagacccccgtcccgcgaaacaccgggccccgcgcagcgtccgggcctgacaccgctccggcggctcgcctcctatgcgcccccgcgccaccgtcgcccgcccgcccgggcccctgcagccgcccaggtgccagcacggagcgcctggcggcggaacgcagaccccaggcccggcgcacaccggggacgctgagcgttccaggcgggagggaaggcgggcagagatggagagaggaacgggagacctagaggggcggaaggacgggcggagggacgttaggagggagggagggaggcagggaggcagggaggaacggagggaaagacagagcgacgcagggactgggggcgggcgggagggagccggggaacggggggaggaaggcagggaggaaaagcggtcctcggcctccgggagtagcgggacccccgccctccgggaaaacggtcagcgtccggcgcgggctgagggctgggcccacagccgccgcgccggccggcggggcaccacccattcgccccggttccgtggcccagggagtgggcggtttcctccgggacaaaagaccgggactcgggttgccgtcgggtcttcacccgcgcggttcacagaccgcacatccccaggctgagccctgcaacgcggcgcgaggccgacagccccggccacggaggagccacacgcaggacgacggaggcgtgattttggtttccgcgtggctttgccctccgcaaggcggcctgttgctcacgtctctccggcccccgaaaggctggccatgccgactgtttgctcccggagctctgcgggcacccggaaacatgcagggaagggtgcaagcccggcacggtgccttcgctctccttgccaggttccaaaccggccacactgcagactccccacgttgccgcacgcgggaatccatcgtcaggccatcacgccggggaggcatctcctctctggggtctcgctctggtcttctacgtggaaatgaacgagagccacacgcctgcgtgtgcgagaccgtcccggcaacggcgacgcccacaggcattgcctccttcacggagagagggcctggcacactcaagactcccacggaggttcagttccacactcc

SEQ ID NO: 88 - DNA, 1296 bp, Artificial Sequence
  Synthetic
caccaggtgggccgcctactgcgcacgcgcgggtttgcgggcagccgcctgggctgtgggagcagcccgggcagagctctcctgcctctccaccagcccaccccgccgcctgaccgccccctccccaccccccaccccccacccccggaaaacgcgtcgtcccctgggctgggtggtgacccccgtcccgcgaaacaccgggccccgcgcagcgtccgggcctgacaccgctccggcggctcgcctcctatgcgcccccgcgccaccgtcgcccgcccgcccgggcccctgcagccgcccaggtgccagcacggagcgcctggcggcggaacgcagaccccaggcccggcgcacaccggggacgctgagcgttccaggcgggagggaaggcgggcagagatggagagaggaacgggagtcctagaggggcggaaggacgggcggagggacgttaggagggagggagggaggcagggaggcagggaggaacggagggaaagacagagcgacgcagggactgggggcgggcgggagggagccggggaacggggggaggaaggcagggaggaaaagcggtcctcggcctccgggagtagcgggacccccgccctccgggaaaacggtcagcgtccggcgcgggctgagggctgggcccacagccgccgcgccggccggcggggcaccacccattcgccccggttccgtggcccagggagtgggcggtttcctccgggacaaaagaccgggactcgggttgccgtcgggtgttcacccgcgcggttcacagaccgcacatccccaggctgagccctgcaacgcggcgcgaggccgacagccccggccacggaggagccacacgcaggacgacggaggcgtgattttggtttccgcgtggctttgccctccgcaaggcggcctgttgctcaagtctctccggcccccgaaaggctggccatgccgactgtttgctcccggagctctgcgggcacccggaaacatgcagggaagggtgcaagcccggcacggtgccttcgctctccttgccaggttccaaaccggccacactgcagactccccacgttgccgcacgcgggaatccatcgtcaggccatcacgccggggaggcatctcctctctggggtgtcgctctggacttctacgtggaaatgaacgagagccacacgcctgcgtgtgccagaccgtcccggcaacggcgacgcccacaggcattgcctccttcacggagagagggcctggcacactcaagactcccacggaggttcagttccacactcc

SEQ ID NO: 89 - DNA, 433 bp, Artificial Sequence
  Synthetic
ggcgggagggaaggcgggcagagatggagagaggaacgggagacctagaggggcggaaggacgggcggagggacgttaggagggagggagggaggcagggaggcagggaggaacggagggaaagacagagcgacgcagggactgggggcgggcgggagggagccggggaacggggggaggaaggcagggaggaaaagcggtcctcggcctccgggagtagcgggacccccgccctccgggaaaacggtcagcgtccggcgcgggctgagggctgggcccacagccgccgcgccggccggcggggcaccacccattcgccccggttccgtggcccagggagtgggcggtttcctccgggacaaaagaccgggactcgggttgccgtcgggtcttcacccgcgcggttcacagaccgcacatccccaggctgagc

SEQ ID NO: 90 - DNA, 433 bp, Artificial Sequence
  Synthetic
ggcgggagggaaggcgggcagagatggagagaggaacgggagtcctagaggggcggaaggacgggcggagggacgttaggagggagggagggaggcagggaggcagggaggaacggagggaaagacagagcgacgcagggactgggggcgggcgggagggagccggggaacggggggaggaaggcagggaggaaaagcggtcctcggcctccgggagtagcgggacccccgccctccgggaaaacggtcagcgtccggcgcgggctgagggctgggcccacagccgccgcgccggccggcggggcaccacccattcgccccggttccgtggcccagggagtgggcggtttcctccgggacaaaagaccgggactcgggttgccgtcgggtgttcacccgcgcggttcacagaccgcacatccccaggctgagc

SEQ ID NO: 91 - DNA, 65 bp, Artificial Sequence
  Synthetic
agaggggcggaagggacgttaggagggaggcagggaggcagggaggcagggaggaacggagggag

SEQ ID NO: 92 - DNA, 1213 bp, Artificial Sequence
  Synthetic
gcgagctcacggggacagcccccccccaaagcccccagggatgtaattacgtccctcccccgctagggggcagcagcgagccgcccggggctccgctccggtccggcgctccccccgcatccccgagccggcagcgtgcggggacagcccgggcacggggaaggtggcacgggatcgctttcctctgaacgcttctcgctgctctttgagcctgcagacacctggggggatacggggaaaaagctttaggctgaaagagagatttagaatgacagaatcatagaacggcctgggttgcaaaggagcacagtgctcatccagatccaaccccctgctatgtgcagggtcatcaaccagcagcccaggctgcccagagccacatccagcctggccttgaatgcctgcagggatggggcatccacagcctccttgggcaacctgttcagtgcgtcaccaccctctgggggaaaaactgcctcctcatatccaacccaaacctcccctgtctcagtgtaaagccattcccccttgtcctatcaagggggagtttgctgtgacattgttggtctggggtgacacatgtttgccaattcagtgcatcacggagaggcagatcttggggataaggaagtgcaggacagcatggacgtgggacatgctggtgttgagggctctgggacactctccaagtcacagcgttcagaacagccttaaggataagaagataggatagaaggacaaagagcaagttaaaacccagcatggagaggagcacaaaaaggccacagacactgctggtccctgtgtctgagcctgcatgtttgatggtgtctggatgcaagcagaaggggtggaagtgcttgcctggagagatacagctgggtcagtaggactgggacaggcagctggagaattgccatgtagatgttcatacaatcgtcaaatcatgaaggctggaaaagccctccaagatccccaagaccaaccccaacccacccaccgtgcccactggccatgtccctcagtgccacatccccacagttcttcatcacctccagggacggtgacccccccacctccgtgggcagctgtgccactgcagcaccgctctttggagaaggtaaatcttgctaaatccagcccgaccctcccctggcacaacgtaaggccattatctctcatccaactccaggacggagtcagtgagaatatt

SEQ ID NO: 93 - DNA, 246 bp, Artificial Sequence
  Synthetic
gcgagctcacggggacagcccccccccaaagcccccagggatgtaattacgtccctcccccgctagggggcagcagcgagccgcccggggctccgctccggtccggcgctccccccgcatccccgagccggcagcgtgcggggacagcccgggcacggggaaggtggcacgggatcgctttcctctgaacgcttctcgctgctctttgagcctgcagacacctggggggatacggggaaaaagctt

SEQ ID NO: 94 - DNA, 502 bp, Artificial Sequence
  Synthetic
cctctcccggccagaggagcaaggtatgcgggaggcgaccaggaggatagcggggctgacgtcgggaggtggcctccgtgggaaggacacccggatcttgacacagccttggcagcggagtcaggaagagtaggggtaggttctggacgccctcttggccagctcatcgccgccccaccctctgctggagcacagagtaattcatacaaaaggagggatcgccttcgcaaggggagagcccagggaccgtccctaaattctcacagacccaaatccctgtagccgccccacgacagcgcgaggagcatgcgcccagggctgagcgcgggtagatcagagcacacaagctcacagtccccggcggtggggggaggggcgcgctgagcgggggccagggagctggcgcggggcaaactgggaaagtggtgtcgtgtgctggctccgccctcttcccgagggtgggggagaacggtatataagtgcggtagtcgccttggacgtt

SEQ ID NO: 95 - DNA, 294 bp, Artificial Sequence
  Synthetic
aagtttccagagctttcgaggaaggtttcttcaactcaaattcatccgcctgataattttcttatattttcctaaagaaggaagagaagcgcatagaggagaagggaaataattttttaggagcctttcttacggctatgaggaatttggggctcagttgaaaagcctaaactgcctctcgggaggttgggcgcggcgaactactttcagcggcgcacgcagacggcgtctacgtgaggggtgataagtgacgcaacactcgttgcataaatttgcgctccgccagcccggagc

SEQ ID NO: 96 - DNA, 455 bp, Artificial Sequence
  Synthetic
caacctttggagctaagccagcaatggtagagggaagattctgcacgtcccttccaggcggcctccccgtcaccaccccccccaacccgccccgaccggagctgagagtaattcatacaaaaggactcgcccctgccttggggaatcccagggaccgtcgttaaactcccactaacgtagaacccagagatcgctgcgttcccgccccctcacccgcccgctctcgtcatcactgaggtggagaatagcatgcgtgaggctccggtgcccgtcagtgggcagagcgcacatcgcccacagtccccgagaagttggggggaggggtcggcaattgaacgggtgcctagagaaggtggcgcggggtaaactgggaaagtgatgtcgtgtactggctccgcctttttcccgagggtgggggagaaccgtatataagtgcagtagtcgccgtgaacgtt

SEQ ID NO: 97 - DNA, 554 bp, Artificial Sequence
  Synthetic
ggagacgatgacgtcgaggagaagttccccaactttcccgcctctcagcctttgaaagaaagaaaggggagggggcaggccgcgtgcagccgcgagcggtgctgggctccggctccaattccccatctcagtcgttcccaaagtcctcctgtttcatccaagcgtgtaagggtccccgtccttgactccctagtgtcctgctgcccacagtccagtcctgggaaccagcaccgatcacctcccatcgggccaatctcagtcccttcccccctacgtcggggcccacacgctcggtgcgtgcccagttgaaccaggcggctgcggaaaaaaaaaagcggggagaaagtagggcccggctactagcggttttacgggcgcacgtagctcaggcctcaagaccttgggctgggactggctgagcctggcgggaggcggggtccgagtcaccgcctgccgccgcgcccccggtttctataaattgagcccgcagcctcccgcttcgctctctgctcctcctgttcgacagtcagccgcatcttcttttgcgtcgccag

SEQ ID NO: 98 - DNA, 646 bp, Artificial Sequence
  Synthetic
ggagacgcgaagaacaacgagaagatcctcaacttctcctaagccttttcactaatagggagaagttcgatggggcagccttgggcagacccacacttctgctccatttccctggttcctgcagctctcagattctcccattttattcgggaagcagctttctggtttctgggtcctggatgtccttggtgcacactccaaggactcctcgtccttaatccatagtctgtattccctgagtcctatcctgggaaccctcatccggtcacttcctcggcgggacaatctcagctcccctccccctctcaggtcggagcccacacgcttggtgcgtgcacatttcaaaaacgaggcgggtccaaaaagagggagggggggaatgagagaggcccagctactcgcggctttacgggtgcacgtagctcaggcctctgcgcccttgagctgggactggatgagccgagcgggaggcggggcgcgcgtcatcagctccccccaccatccagttcctataaatacggactgcagccctccctggtgctctctgctcctccctgttctagagacagccgcatcttcttgtgcagtgccaggctctctgctcctcctgttcgacagtcagccgcatcttcttttgcgtcgccag

SEQ ID NO: 99 - DNA, 218 bp, Artificial Sequence
  Synthetic
gggaatgagagaggcccagctactcgcggctttacgggtgcacgtagctcaggcctctgcgcccttgagctgggactggatgagccgagcgggaggcggggcgcgcgtcatcagctccccccaccatccagttcctataaatacggactgcagccctccctggtgctctctgctcctccctgttctagagacagccgcatcttcttgtgcagtgccag

SEQ ID NO: 100 - DNA, 519 bp, Artificial Sequence
  Synthetic
cgaagaacaacgaggagaagatcctcaacttttccgcagccttttcaataatggggagaggttcgatgatgcagtggcagggagacccacacttctccatttcccctgttctcccattttactcgggaagcagcattcaggtctctgggtcctggatgtccttggtgcacactccaaggactcctcgtccttaagttcatagtctgtattccctgagtcctatcctgggaaccatcacccggtcacctcctgagcggggcaatctcagctcccctccccctatcagttcggagcccacacgcttggtgcgtgcacatttcaaaaatgaggcgggtccaaagagagggaggaggggaaatgagagaggcccagctactcgcggctttacgggtgcacgtagctcaggcctctgcgcccttgagctaggactggataagcagggcgggaggcggggcgcgcgtcatcagctcccccccaccatccgggttcctataaatacggactgcagccctccctggt

SEQ ID NO: 101 - DNA, 215 bp, Artificial Sequence
  Synthetic
acgctcggtgcgtgcccagttgaaccaggcggctgcggaaaaaaaaaagcggggagaaagtagggcccggctactagcggttttacgggcgcacgtagctcaggcctcaagaccttgggctgggactggctgagcctggcgggaggcggggtccgagtcaccgcctgccgccgcgcccccggtttctataaattgagcccgcagcctcccgcttc

SEQ ID NO: 102 - DNA, 103 bp, Artificial Sequence
  Synthetic
ccttgggctgggactggctgagcctggcgggaggcggggtccgagtcaccgcctgccgccgcgcccccggtttctataaattgagcccgcagcctcccgcttc

SEQ ID NO: 103 - DNA, 353 bp, Artificial Sequence
  Synthetic
tcctatcctgggaaccctcatccggtcacttcctcggcgggacaatctcagctcccctccccctctcaggtcggagcccacacgcttggtgcgtgcacatttcaaaaacgaggcgggtccaaaaagagggagggggggaatgagagaggcccagctactcgcggctttacgggtgcacgtagctcaggcctctgcgcccttgagctgggactggatgagccgagcgggaggcggggcgcgcgtcatcagctccccccaccatccagttcctataaatacggactgcagccctccctggtgctctctgctcctccctgttctagagacagccgcatcttcttgtgcagtgccag

SEQ ID NO: 104 - DNA, 151 bp, Artificial Sequence
  Synthetic
agctgggactggatgagccgagcgggaggcggggcgcgcgtcatcagctccccccaccatccagttcctataaatacggactgcagccctccctggtgctctctgctcctccctgttctagagacagccgcatcttcttgtgcagtgccag

SEQ ID NO: 105 - DNA, 99 bp, Artificial Sequence
  Synthetic
agctaggactggataagcagggcgggaggcggggcgcgcgtcatcagctcccccccaccatccgggttcctataaatacggactgcagccctccctggt

SEQ ID NO: 106 - DNA, 524 bp, Artificial Sequence
  Synthetic
atcctcaacttttccacagcctttgcataaaggggagagggtcggcggtgcagctgtggcacacacgcacttctgctcaacccgcccccccccgcccccgttcctgttccttcccaggttctccccattttatcggggcggcaacttttaggtccctgggtcctggaagtccttagtacacactcttcgtccttaagtccatagtctgtattccctcggtcctatcctgtcccccatcaccgggtcacctccccagcgaagcaatctcagttcccctccccctctcagccccgagcccacacgtttggtgcgtgcacatttcaaaaacgaggcgggtccaaagagagggggtggggaggtgccgagtggcccagctactcgcggctttacgggtgcacgtagctcaggcctcagcgcccttgagctgtgactggatggatgagcggggcgggaggcggggcgagcgtcctcggcgctccccaccaccccagttcctataaatacggactgcagccctccccggt

SEQ ID NO: 107 - DNA, 497 bp, Artificial Sequence
  Synthetic
ttcctcagcttgcccgcctcccagcctttgaaagaataggggaagggggtggcgcgtgctgtccccaggcgaccgggctcaggctccgactccccatgccagccgctcccgggtcgtccgtgcggccccttggcgcggcctgggctcctggacctctctggttcccaccaggatccccatccccgagtctatagtggcttgcgtgcccatagtcccgtcccgggaacctttagccatcactgcccccgcgggccacctcggtcccctccccctctcaggcctgggcccacatgcctggtgcgtgcactggggaacaaggcgggcccgcaaaaagaaaaacgaggaggcccggctactcgcgggtttacgggcgcacgtagctcaggcctcctcgcccttgggctgggactgggcgagcagcacgggaggcggggcgcacgtcacccacgccccgccgcccccagtccctataaattgaggctgcgggttcctccggt

SEQ ID NO: 108 - DNA, 415 bp, Artificial Sequence
  Synthetic
ggagacggggtccgaatttcaaagtcctttttattgacttacaaggttttcaaggaaaatcttggaagtaactgtgttccgaagaatctacgtttaaaaaccgacccctggatctttgccttgggtccaaggaccgagctggccacgccccagccgcgccgcagccactcccaaggcagttcaagtgttaagcccgaaaggtagagctctgcgcatgtgcacacccgtccatagctgggtcccagccaaccaggccggaggagcacccgcgccgtcacgtgacgtgcccaaccggcgtcgacctataaaaggccgggcgttgacgtcagcggactcttccgccgcagccgccgccatcgtcggcgcgcttccctgttcacctctgtatttgagaatccgacgccatctgccacca

SEQ ID NO: 109 - DNA, 416 bp, Artificial Sequence
  Synthetic
ggagacgcggtccgaatttcaaagtctttttcctattgacctacaaggttttcaagaatcatgttgtaagcaactgtgttctgaggaatctatgtttaaaaacccatccgtggatcttggcccagggtccagagactgagctagccacgccccggccgcgccgcagccactcccacggcagttcaagtgttaagtcccaaagaccgcgctctgtgcatgcgcagacccgtccacagctggctcctagccaacccggccggacgagcacccggcgccgtcacgtgacgcacccaaccggcgtcgacctataaaaggccgggcgttgacgtcagcgttctcttccgccgcagccgccgccatcgtcggcgcgcttccctgttcacctctgactctgagaatccgtcgccatccgccag

SEQ ID NO: 110 - DNA, 147 bp, Artificial Sequence
  Synthetic
ggagacgttccgcccattctccgccccatggctgactaattttttttatttatgcagaggccgaggccgcctcggcctctgagctattccagaagtagtgaggaggcttttttggaggcctaggcttttgcaaaaagctcgtctcag

SEQ ID NO: 111 - DNA, 424 bp, Artificial Sequence
  Synthetic
ggagacgcagctgcttcatccccgtggcccgttgctcgcgtttgctggcggtgtccccggaagaaatatatttgcatgtctttagttctatgatgacacaaaccccgcccagcgtcttgtcattggcgaaaacacgcagatgcagtcggggcggcgcggtcccaggtccacttcgcatattaaggtgacgcgtgtggcctcgaacacagagcgactctgcagggacacaagacaggcttgcgagatatgtttgagaataccactttatcccgcgtcagggagaggcagtgcgtaaaaagacgcggactcatgtgaaatactggtttttagtgcgccagatctctataatctcgcgcaacctattttcccctcgaacactttttaagccgtagataaacaggctgggacacttcactcgtctcag

SEQ ID NO: 112 - DNA, 226 bp, Artificial Sequence
  Synthetic
ggagacggcacatcgcccacagtccccgagaagttgggaggggtcggcggatccggccccgcccagcgtcttgtcattggcgtattcgaacacgcagatgcagtcggggcggcgcggtccgaggtccacttcgcatattaaggtgacgcgtgtggcctcgaacaccgagcgaccctgcagcgacccgcttaacagcgtcaacagcgtgccgcagatctcgtctcag

SEQ ID NO: 113 - DNA, 326 bp, Artificial Sequence
  Synthetic
ggagacggcacatcgcccacagtccccgagaagttgggaggggtcggccagtgtggttttcaagaggaagcaaaaagcctctccacccaggcctggaatgtttccacccaatgtcgagcagtgtggttttgcaagaggaagcaaaaagcctctccacccaggcctggaatgtttccacccaatgtcgagcaaaccccgcccagcgtcttgtcattggcgaattcgaacacgcagatgcagtcggggcggcgcggtcccaggtccacttcgcatattaaggtgacgcgtgtggcctcgaacaccgagcgaccctgcaggcgtctcag

SEQ ID NO: 114 - DNA, 1367 bp, Artificial Sequence
  Synthetic
ggagacgcggtccgaatttcaaagtctttttcctattgacctacaaggttttcaagaatcatgttgtaagcaactgtgttctgaggaatctatgtttaaaaacccatccgtggatcttggcccagggtccagagactgagctagccacgccccggccgcgccgcagccactcccacggcagttcaagtgttaagtcccaaagaccgcgctctgtgcatgcgcagacccgtccacagctggctcctagccaacccggccggacgagcacccggcgccgtcacgtgacgcacccaaccggcgtcgacctataaaaggccgggcgttgacgtcagcgttctcttccgccgcagccgccgccatcgtcggcgcgcttccctgttcacctctgactctgagaatccgtcgccatccgccaggtgagtctcctcggctccgctagactcggggaccgagaggaatctctggggcagcgggacgtggctgtagcgggacgctgagagggacgggaggaagagacatggctgccctggcccgggcggcaggacgtggtcgggccgcggcgccatatctgcgcgtccctgagggccttgggagtgtcaactgccgaggtcggggtgttttcttgaagtccttcaactccccgcggccgccggggtgactgcgggaggggttgtgcttggtgatgtggcagcgggcaaagcgccgtccccgcgcccctggtgacgggcggagggtgtcctcgggaggtgacagcctgtagggctggcttccttggacacctccagtgggctgaacgccttccgggccctttccggtagcccccgtgtctgttttctatctgagttcacacgtgagcaccggtccccataatctaagaaagtggctcactgggcctagtggcgcattgtggcctttgatccgggctttgaccttggcgcacagcacccagtggtttggggaagaggtgtgtgtagcagaggaggttttttcgtgctttggtcccaatcaatccggcatctttgcagtgccgaggtggccgtgcaccttggctttgaattcttgtgctgaggttatgtgacttgagcctcaagatagggtgttctagcacaggcttgctcttaagtgtcgcagttgtcggtttcggcgtttgtttagagctgtggacacatctgtgaacttttgatgcttatttcagaggtcctgggttgtacgtttgagtcacactgtgagctcagctccaatcttgggccgacatctggttcctgcccctgctgtggggtgctattgacccaccgatgcctgccaagttgggttcccagaatcagcctggctgcccatccccccaccacaggtgaacttcgtctcag

SEQ ID NO: 115 - DNA, 457 bp, Artificial Sequence
  Synthetic
ctaccgggtaggggaggcgcttttcccaaggcagtctggagcatgcgctttagcagccccgctgggcacttggcgctacacaagtggcctctggcctcgcacacattccacatccaccggtaggcgccaaccggctccgttctttggtggccccttcgcgccaccttctactcctcccctagtcaggaagttcccccccgccccgcagctcgcgtcgtgcaggacgtgacaaatggaagtagcacgactcactagtctcgtgcagatggacagcaccgctgagcaatggaagcgggtaggcctttggggcagcggccaatagcagctttgctccttcgctttctgagagcagcggccgggaaggggcggtgcgggaggcggggtgtggggcggtagtgtgggccctgttcctgcccgcgcggtgttccgcattctgcaagcctccggagcgcacgtc

SEQ ID NO: 116 - DNA, 507 bp, Artificial Sequence
  Synthetic
ctaccgggtaggggaggcgcttttcccaaggcagtctggagcatgcgctttagcagccccgctgggcacttggcgctacacaagtggcctctggcctcgcacacattccacatccaccggtaggcgccaaccggctccgttctttggtggccccttcgcgccaccttctactcctcccctagtcaggaagttcccccccgccccgcagctcgcgtcgtgcaggacgtgacaaatggaagtagcacgactcactagtctcgtgcagatggacagcaccgctgagcaatggaagcgggtaggcctttggggcagcggccaatagcagctttgctccttcgctttctgggctcagaggctgggaaggggtgggtccgggggcgggctcaggggcgggctcaggggcggggcgggcgcccgaaggtcctccggaggcccggcattctgcacgcttcaaaagcgcacgtctgccgcgctgttctcctcttcctcatctccgggcctttcgtc

SEQ ID NO: 117 - DNA, 460 bp, Artificial Sequence
  Synthetic
ctaccgggtaggggaggcgcttttcccaaggcagtctggagcatgcgctttagcagccccgctgggcacttggcgctacacaagtggcctctggcctcgcacacattccacatccaccggtaggcgccaaccggctccgttctttggtggccccttcgcgccaccttctactcctcccctagtcaggaagttcccccccgccccgcagctcgcgtcgtgcaggacgtgacaaatggaagtagcacgactcactagtctcgtgcagatggacagcaccgctgagcaatggaagcgggtaggcctttggggcagcggccaatagcagctttgctccttcgctttctgggctcaggggcggggcgggcgcccgaaggtcctccggaggcccggcattctgcacgcttcaaaagcgcacgtctgccgcgctgttctcctcttcctcatctccgggcctttcgtc

SEQ ID NO: 118 - DNA, 466 bp, Artificial Sequence
  Synthetic
cggggttggggttgcgccttttccaaggcagccctgggtttgcgcagggacgcggctgctctgggcgtggttccgggaaacgcagcggcgccgaccctgggcctcgcacattcttcacgtccgttcgcagcgtcacccggatcttcgccgctacccttgtgggccccccggcgacgcttcctcgtccgcccctaagtcgggaaggttccttgcggttcgcggcgtgccggacgtgacaaacggaagccgcacgtctcactagtaccctcgcagacggacagcgccagggagcaatggcagcgcgccgaccgcgatgggctgtggccaatagcggctgctcagcagggcgcgccgagagcagcggccgggaaggggcggtgcgggaggcggggtgtggggcggtagtgtgggccctgttcctgcccgcgcggtgttccgcattctgcaagcctccggagcgcacgtc

SEQ ID NO: 119 - DNA, 215 bp, Artificial Sequence
  Synthetic
cagctgcttcatccccgtggcccgttgctcgcgtttgctggcggtgtccccggaagaaatatatttgcatgtctttagttctatgatgacacaaaccccgcccagcgtcttgtcattggcgaaaacacgcagatgcagtcggggcggcgcggtcccaggtccacttcgcatattaaggtgacgcgtgtggcctcgaacacagagcgactctgcag

SEQ ID NO: 120 - DNA, 753 bp, Artificial Sequence
  Synthetic
aaatgagtcttcggacctcgcgggggccgcttaagcggtggttagggtttgtctgacgcggggggagggggaaggaacgaaacactctcattcggaggcggctcggggtttggtcttggtggccacgggcacgcagaagagcgccgcgatcctcttaagcacccccccgccctccgtggaggcgggggtttggtcggcgggtggtaactggcgggccgctgactcgggcgggtcgcgcgccccagagtgtgaccttttcggtctgctcgcagacccccgggcggcgccgccgcggcggcgacgggctcgctgggtcctaggctccatggggaccgtatacgtggacaggctctggagcatccgcacgactgcggtgatattaccggagaccttctgcgggacgagccgggtcacgcggctgacgcggagcgtccgttgggcgacaaacaccaggacggggcacaggtacactatcttgtcacccggaggcgcgagggactgcaggagcttcagggagtggcgcagctgcttcatccccgtggcccgttgctcgcgtttgctggcggtgtccccggaagaaatatatttgcatgtctttagttctatgatgacacaaaccccgcccagcgtcttgtcattggcgaattcgaacacgcagatgcagtcggggcggcgcggtcccaggtccacttcgcatattaaggtgacgcgtgtggcctcgaacaccgagcgaccctgcagcgacccgcttaa

SEQ ID NO: 121 - DNA, 270 bp, Artificial Sequence
  Synthetic
cagtgtggttttcaagaggaagcaaaaagcctctccacccaggcctggaatgtttccacccaatgtcgagcagtgtggttttgcaagaggaagcaaaaagcctctccacccaggcctggaatgtttccacccaatgtcgagcaaaccccgcccagcgtcttgtcattggcgaattcgaacacgcagatgcagtcggggcggcgcggtcccaggtccacttcgcatattaaggtgacgcgtgtggcctcgaacaccgagcgaccctgcagg

SEQ ID NO: 122 - DNA, 149 bp, Artificial Sequence
  Synthetic
tcccgcccctaactccgcccagttccgcccattctccgccccatggctgactaattttttttatttatgcagaggccgaggccgcctcggcctctgagctattccagaagtagtgaggaggcttttttggaggtataggcttttgcaaa

SEQ ID NO: 123 - DNA, 128 bp, Artificial Sequence
  Synthetic
gttccgcccattctccgccccatggctgactaattttttttatttatgcagaggccgaggccgcctcggcctctgagctattccagaagtagtgaggaggcttttttggaggcctaggcttttgcaaa

SEQ ID NO: 124 - DNA, 408 bp, Artificial Sequence
  Synthetic
cagctgcttcatccccgtggcccgttgctcgcgtttgctggcggtgtccccggaagaaatatatttgcatgtctttagttctatgatgacacaaaccccgcccagcgtcttgtcattggcgaaaacacgcagatgcagtcggggcggcgcggtcccaggtccacttcgcatattaaggtgacgcgtgtggcctcgaacacagagcgactctgcagggacacaagacaggcttgcgagatatgtttgagaataccactttatcccgcgtcagggagaggcagtgcgtaaaaagacgcggactcatgtgaaatactggtttttagtgcgccagatctctataatctcgcgcaacctattttcccctcgaacactttttaagccgtagataaacaggctgggacacttcac

SEQ ID NO: 125 - DNA, 332 bp, Artificial Sequence
  Synthetic
ggcctccgcgccgggttttggcgccccccgcgggcgccccctcctcacggcgagcgctgccacgtcagacgaagggcgcacgagcgtcctgatccttccgcccggacgctcaggacagcggcccgctgctcataagactcggccttagaaccccagtatcagcagaaggacattttaggacgggacttgggtgactctagggcactggttttctttccagagagcggaacaggcgaggaaaagtagtcccttctcggcgattctgcggagggatctccgtggggcggtgaacgccgatgattatataaggacgcgccgggtgtggcacagct

SEQ ID NO: 126 - DNA, 334 bp, Artificial Sequence
  Synthetic
ggcctccgcgccgggttttggcgcctcccgcgggcgcccccctcctcacggcgagcgctgccacgtcagacgaagggcgcagcgagcgtcctgatccttccgcccggacgctcaggacagcggcccgctgctcataagactcggccttagaaccccagtatcagcagaaggacattttaggacgggacttgggtgactctagggcactggttttctttccagagagcggaacaggcgaggaaaagtagtcccttctcggcgattctgcggagggatctccgtggggcggtgaacgccgatgattatataaggacgcgccgggtgtggcacagct

SEQ ID NO: 127 - DNA, 334 bp, Artificial Sequence; identical to SEQ ID NO: 126
  Synthetic

SEQ ID NO: 128 - DNA, 178 bp, Artificial Sequence
  Synthetic
gcacatcgcccacagtccccgagaagttggggggaggctctggctgcaggtaattgaaccggtgcctagagaaggtggcgcggggtaaactgggaaagtgatgtcgtgtactggctccgcctttttcccgagggtgggggagaaccgtatataagtgcagtagtcgccgtgaacgttc

SEQ ID NO: 129 - DNA, 369 bp, Artificial Sequence
  Synthetic
acccgccccgaccggagctgagagtaattcatacaaaaggactcgcccctgccttggggaatcccagggaccgtcgttaaactcccactaacgtagaacccagagatcgctgcgttcccgccccctcacccgcccgctctcgtcatcactgaggtggagaatagcatgcgtgaggctccggtgcccgtcagtgggcagagcgcacatcgcccacagtccccgagaagttgggaggggtcggcaattgaaccggtgcctagagaaggtggcgcggggtaaactgggaaagtgatgtcgtgtactggctcagcctttttcccgagggtgggggagaaccgtatataagtgcagtagtcgccgtgaacgttc

SEQ ID NO: 130 - DNA, 369 bp, Artificial Sequence
  Synthetic
acccgccccgaccggagctgagagtaattcatacaaaaggactcgcccctgccttggggaatcccagggaccgtcgttaaactcccactaacgtagaacccagagatcgctgcgttcccgccccctcacccgcccgctctcgtcatcactgaggtggagaatagcatgcgtgaggctccggtgcccgtcagtgggcagagcgcacatcgcccacagtccccgagaagttgggaggggtcggcaattgaaccggtgcctagagaaggtggcgcggggtaaactgggaaagtgatgtcgtgtactggctccgcctttttcccgagggtgggggagaaccgtatataagtgcagtagtcgccgtgaacgttc

SEQ ID NO: 131 - DNA, 372 bp, Artificial Sequence
  Synthetic
acccgccccgaccggagctgagagtaattcatacaaaaggactcgcccctgccttggggaatcccagggaccgtcgttaaactcccactaacgtagaacccagagatcgctgcgttcccgccccctcacccgcccgctctcgtcatcactgaggtggagaatagcatgcgtgaggctccggtgcccgtcagtgggcagagcgcacatcgcccacagtccccgagaagttggggggaggggtcggcaattgaaccggtgcctagagaaggtggcgcggggtaaactgggaaagtgatgtcgtgtactggctccgcctttttcccgagggtgggggagaaccgtatataagtgcagtagtcgccgtgaacgttc

SEQ ID NO: 132 - DNA, 372 bp, Artificial Sequence
  Synthetic
acccgccccgaccggagctgagagtaattcatacaaaaggactcgcccctgccttggggaatcccagggaccgtcgttaaactcccactaacgtagaacccagagatcgctgcgttcccgccccctcacccgcccgctctcgtcatcactgaggtggagaatagcatgcgtgaggctccggtgcccgtcagtgggcagagcgcacatcgcccacagtccccgagaagttggggggaggggtcggcaattgaacgggtgcctagagaaggtggcgcggggtaaactgggaaagtgatgtcgtgtactggctccgcctttttcccgagggtgggggagaaccgtatataagtgcagtagtcgccgtgaacgttc

SEQ ID NO: 133 - DNA, 372 bp, Artificial Sequence
  Synthetic
acccgccccgaccggagctgagagtaattcatacaaaaggactcgcccctgccttggggaatcccagggaccgtcgttaaactcccactaacgtagaacccagagatcgctgcgttcccgccccctcacccgcccgctctcgtcatcactgaggtggagaatagcatgcgtgaggctccggtgcccgtcagtgggcagagcgcacatcgcccacagtccccgagaagttggggggaggggtcggcaattgatccggtgcctagagaaggtggcgcggggtaaactgggaaagtgatgtcgtgtactggctccgcctttttcccgagggtgggggagaaccgtatataagtgcagtagtcgccgtgaacgttc

SEQ ID NO: 134 - DNA, 570 bp, Artificial Sequence
  Synthetic
ctgggctgagacccgcagaggaagacgctctagggatttgtcccggactagcgagatggcaaggctgaggacgggaggctgattgagaggcgaaggtacaccctaatctcaatacaacctttggagctaagccagcaatggtagagggaagattctgcacgtcccttccaggcggcctccccgtcaccaccccccccaacccgccccgaccggagctgagagtaattcatacaaaaggactcgcccctgccttggggaatcccagggaccgtcgttaaactcccactaacgtagaacccagagatcgctgcgttcccgccccctcacccgcccgctctcgtcatcactgaggtggagaagagcatgcgtgaggctccggtgcccgtcagtgggcagagcgcacatcgcccacagtccccgagaagttggggggaggggtcggcaattgaaccggtgcctagagaaggtggcgcggggtaaactgggaaagtgatgtcgtgtactggctccgcctttttcccgagggtgggggagaaccgtatataagtgcagtagtcgccgtgaacgttc

SEQ ID NO: 135 - DNA, 168 bp, Artificial Sequence
  Synthetic
gcacatcgcccacagtccccgagaagttgggaggggtcggcaattgaaccggtgcctagagaaggtggcgcggggtaaactgggaaagtgatgtcgtgtactggctccgcctttttcccgagggtgggggagaaccgtatataagtgcagtagtcgccgtgaacgttc

SEQ ID NO: 136 - DNA, 171 bp, Artificial Sequence
  Synthetic
gcacatcgcccacagtccccgagaagttggggggaggggtcggcaattgaaccggtgcctagagaaggtggcgcggggtaaactgggaaagtgatgtcgtgtactggctccgcctttttcccgagggtgggggagaaccgtatataagtgcagtagtcgccgtgaacgttc

SEQ ID NO: 137 - DNA, 171 bp, Artificial Sequence
  Synthetic
gcacatcgcccacagtccccgagaagttggggggaggggtcggcaattgaacgggtgcctagagaaggtggcgcggggtaaactgggaaagtgatgtcgtgtactggctccgcctttttcccgagggtgggggagaaccgtatataagtgcagtagtcgccgtgaacgttc

SEQ ID NO: 138 - DNA, 168 bp, Artificial Sequence
  Synthetic
gcacatcgcccacagtccccgagaagttgggaggggtcggcaattgaaccggtgcctagagaaggtggcgcggggtaaactgggaaagtgatgtcgtgtactggctcagcctttttcccgagggtgggggagaaccgtatataagtgcagtagtcgccgtgaacgttc

SEQ ID NO: 139 - DNA, 171 bp, Artificial Sequence
  Synthetic
gcacatcgcccacagtccccgagaagttggggggaggggtcggcaattgatccggtgcctagagaaggtggcgcggggtaaactgggaaagtgatgtcgtgtactggctccgcctttttcccgagggtgggggagaaccgtatataagtgcagtagtcgccgtgaacgttc

SEQ ID NO: 140 - DNA, 440 bp, Artificial Sequence
  Synthetic
agcggggctgacgtcgggaggtggcctccgtgggaagggacacccggatcttgacacagccttggcagcggagtaaggaagagtagggatagattctggccgccctcttggccagcttctcgccgccccaccctccgctagggccaagagtaattcatacaaaaggagggatcgccttcgcaaggggagagcccagggaccgtccctaaattctcacagacccaaatccctgtagccgccccacgacagcgcgaggagcatgcgctcagggctgagcgcggggagagcagagcacacaagctcatagaccctggtcgtgggggggaggaccggggagctggcgcggggcaaactgggaaagcggtgtcgtgtgctggctccgccctcttcccgagggtgggggagaacggtatataagtgcggcagtcgccttggacgtt

SEQ ID NO: 141 - DNA, 480 bp, Artificial Sequence
  Synthetic
agcggggctgacgtcgggaggtggcctccgtgggaagggacacccggatcttgacacagccttggcagcggagtaaggaagagtagggatagattctggccgccctcttggccagcttctcgccgccccaccctccgctagggccaagagtaattcatacaaaaggagggatcgccttcgcctggggaagtcccagggaccgtcgctaaattctcataacccataatcccggtacccgccccaccacagtgcgaggagcatgcgctcagggctgagcgcggggagagcagagcacacaagctcatagaccctggtcgtggggggaggggcgcactgagcggggggggggggggtgatgggggggaggaccggggagctggcgcggggcaaactgggaaagcggtgtcgtgtgctggctccgccctcttcccgagggtgggggagaacggtatataagtgcggcagtcgccttggacgttc

SEQ ID NO: 142 - DNA, 316 bp, Artificial Sequence
  Synthetic
ggagccgagagtaattcatacaaaaggagggatcgccttcgcaaggggagagcccagggaccgtccctaaattctcacagacccaaatccctgtagccgccccacgacagcgcgaggagcatgcgcccagggctgagcgcgggtagatcagagcacacaagctcacagtccccggcggtggggggaggggcgcgctgagcgggggccagggagctggcgcggggcaaactgggaaagtggtgtcgtgtgctggctccgccctcttcccgagggtgggggagaacggtatataagtgcggtagtcgccttggacgtt

SEQ ID NO: 143 - DNA, 503 bp, Artificial Sequence
  Synthetic
cctctcccggccagaggagcaaggtatgcgggaggcgaccaggaggatagcggggctgacgtcgggaggtggcctccgtgggaaggacacccggatcttgacacagccttggcagcggagtcaggaagagtaggggtaggttctggacgccctcttggccagctcatcgccgccccaccctctgctggagcacagagtaattcatacaaaaggagggatcgccttcgcaaggggagagcccagggaccgtccctaaattctcacagacccaaatccctgtagccgccccacgacagcgcgaggagcatgcgcccagggctgagcgcgggtagatcagagcacacaagctcacagtccccggcggtggggggaggggcgcgctgagcgggggccagggagctggcgcggggcaaactgggaaagtggtgtcgtgtgctggctccgccctcttcccgagggtgggggagaacggtatataagtgcggtagtcgccttggacgttc

SEQ ID NO: 144 - DNA, 503 bp, Artificial Sequence
  Synthetic
cctctcccggccagaggagcaaggtatgcgggaggcgaccaggaggatagcggggctgacgtcgggaggtggcctccgtgggaaggacacccggatcttgacacagccttggcagcggagtcaggaagagtaggggtaggttctggacgccctcttggccagctcttcgccgccccaccctctgctggagcacagagtaattcatacaaaaggagggatcgccttcgcaaggggagagcccagggaccgtccctaaattctcacagacccaaatccctgtagccgccccacgacagcgcgaggagcatgcgcccagggctgagcgcgggtagatcagagcacacaagctcacagtccccggcggtggggggaggggcgcgctgagcgggggccagggagctggcgcggggcaaactgggaaagtggtgtcgtgtgctggctccgccctcttcccgagggtgggggagaacggtatataagtgcggtagtcgccttggacgttc

SEQ ID NO: 145 - DNA, 301 bp, Artificial Sequence
  Synthetic
ggagccgagagtaattcatacaaaaggagggatcgccttcgcaaggggagagcccagggaccgtccctaaattctcacagacccaaatccctgtagccgccccacgacagcgcgaggagcatgcgctcagggctgagcgcggggagagcagagcacacaagctcatagaccctggtcgtgggggggaggaccggggagctggcgcggggcaaactgggaaagcggtgtcgtgtgctggctccgccctcttcccgagggtgggggagaacggtatataagtgcggcagtcgccttggacgtt

SEQ ID NO: 146 - DNA, 459 bp, Artificial Sequence
  Synthetic
ggcggggctgacgtcgggaggtggcctccacgggaagggacacccggatctcgacacagccttggcagtggagtcaggaagggtaggacagattctggacgccctcttggccagtcctcaccgccccacccccgatggagccgagagtaattcatacaaaaggagggatcgccttcgcccctgggaatcccagggaccgtcgctaaattctggccggcctcccagcccggaaccgctgtgcccgcccagcgcggcgggaggagcctgcgcctagggcggatcgcgggtcggcgggagagcacaagcccacagtccccggcggtgggggaggggcgcgctgagcgggggcccgggagccagcgcggggcaaactgggaaagtggtgtcgtgtgctggctccgccctcttcccgagggtgggggagaacggtataaaagtgcggtagtcgcgttggacgtt

SEQ ID NO: 147 - DNA, 783 bp, Artificial Sequence
  Synthetic
tattaatagcaatcttagctaattaaaatagatagcgtttattgagcgttgggtatcaggcacggtcctaattcttttagatgtctttagttcgtttcactctcccccaaacaatagggtggtattgatcacctccgagcaggtgaaattgaggcacagagaaatcctagtagctggtagaagaacacgcagtgtggtcaagctagcaaggtgtttggtccactgctatatctacaaaacccctaacaatgcctggtgtatagatgctcagtatgcatttgtgggatcagtgattccgatgcctgcttcttataaagtttttatttagaaataattacaggtaaggagttgcaaaaacagtatagtgggatcgagtgtcctttttccctcggcttctcccaggggtatcgtcttacgtaacaatgtccaaacagggaaattgacttgggtataatccacagactctattcaccttgtagattggttttaatagaagtaactggacaacttgtaagctaatatcgttgctatggttctcgttctcagctaaaacggcgctctttactttgtgcacctgaacactgcacaccgagggcgaccaccgcccccgagatgcccagcttctattctagagcgccgcgccggcgccgaatgggttaacgggcggggggacacgcctccgtgcgcttgcgcggcgtcccttcgccccgccttcgcagcgcagtcacatgacccgcccaaccggcgtccgcctataaaaagctgagtgttgacgtcagcgtt

SEQ ID NO: 148 - DNA, 335 bp, Artificial Sequence
  Synthetic
ggatccaacttctaagtccgttttttattgatctaaaaggccttttgcgaatcatcttgaaggcaatcgcgttctgagccacctcagctttggcacacagcgcggggactgtcgcgaggggtttagggcccaagcaggacacaccccgaaatctccgcagccacccccaccccacgcccccggctcttgagggttaaatcgcaggcgcaggttctcgcacgcgcacatcatcccgcaggcgagccccagcacccagcccagggtgcgcgcgcgccgtcacgtgacacgcccaaccggcgtcgccgtataaaagcgcgggcgttgacgtcagcggt

SEQ ID NO: 149 - DNA, 335 bp, Artificial Sequence
  Synthetic
ggatccaacttctaagtccgttttttattgatctaaaaggccttttgcgaatcatcttgaaggcaatcgcgttctgagccacctcagctttggcacacagcgcggggactgtcgcgaggggtttagggcccaagcaggacacaccccgaaatctccgcagccacccccaccccacgcccccggctcttgagggttaaatcgcaggcgctggttctcgcacgcgcacatcatcccgcaggcgagccccagcacccagcccagggtgcgcgcgcgccgtcacgtgacacgcccaaccggcgtcgccgtataaaagcgcgggcgttgacgtcagcgtt

SEQ ID NO: 150 - DNA, 343 bp, Artificial Sequence
  Synthetic
tgacttgggtataatccacagactctattcaccttgtagattggttttaatagaagtaactggacaacttgtaagctaatatcgttgctatggttctcgttctcagctaaaacggcgctctttactttgtgcacctgaacactgcacaccgagggcgaccaccgcccccgagatgcccagcttctattctagagcgccgcgccggcgccgaatgggttaacgggcggggggacacgcctccgtgcgcttgcgcggcgtcccttcgccccgccttcgcagcgcagtcacatgacccgcccaaccggcgtccgcctataaaaagctgagtgttgacgtcagcgtt

SEQ ID NO: 151 - DNA, 329 bp, Artificial Sequence
  Synthetic
cggtccgaatttcaaagtctttttcctattgacctacaaggttttcaagaatcatgttgtaagcaactgtgttctgaggaatctatgtttaaaaacccatccgtggatcttggcccagggtccagagactgagctagccacgccccggccgcgccgcagccactcccacggcagttcaagtgttaagtcccaaagaccgcgctctgtgcatgcgcagacccgtccacagctggctcctagccaacccggccggacgagcacccggcgccgtcacgtgacgcacccaaccggcgtcgacctataaaaggccgggcgttgacgtcagcggt

SEQ ID NO: 152 - DNA, 329 bp, Artificial Sequence
  Synthetic
cggtccgaatttcaaagtctttttcctattgacctacaaggttttcaagaatcatgttgtaagcaactgtgttctgaggaatctatgtttaaaaacccatccgtggatcttggcccagggtccagagactgagctagccacgccccggccgcgccgcagccactcccacggcagttcaagtgttaagtcccaaagaccgcgctctgtgcatgcgcagacccgtccacagctggctcctagccaacccggccggacgagcacccggcgccgtcacgtgacgcacccaaccggcgtcgacctataaaaggccgggcgttgacgtcagcgtt

SEQ ID NO: 153 - DNA, 325 bp, Artificial Sequence
  Synthetic
gggtccgaatttcaaagtcctttttattgacttacaaggttttcaaggaaaatcttggaagtaactgtgttccgaagaatctacgtttaaaaaccgacccctggatctttgccttgggtccaaggaccgagctggccacgccccagccgcgccgcagccactcccaaggcagttcaagtgttaagcccgaaaggtagagctctgcgcatgtgcacacccgtccatagctgggtcccagccaaccaggccggaggagcacccgcgccgtcacgtgacgtgcccaaccggcgtcgacctataaaaggccgggcgttgacgtcagcgg

SEQ ID NO: 154 - DNA, 326 bp, Artificial Sequence
  Synthetic
gggtccgaatttcaaagtcctttttattgacttacaaggttttcaaggaaaatcttggaagtaactgtgttccgaagaatctacgtttaaaaaccgacccctggatctttgccttgggtccaaggaccgagctggccacgccccagccgcgccgcagccactcccaaggcagttcaagtgttaagcccgaaaggtagagctctgcgcatgtgcacacccgtccatagctgggtcccagccaaccaggccggaggagcacccgcgccgtcacgtgacgtgcccaaccggcgtcgacctataaaaggccgggcgttgacgtcagcgtt

SEQ ID NO: 155 - DNA, 944 bp, Artificial Sequence
  Synthetic
gtgagtggcgggtgtggcttccgcgggccccggagctggagccctgctctgagcgggccgggctgatatgcgagtgtcgtccgcagggtttagctgtgagcattcccacttcgagtggcgggcggtgcgggggtgagagtgcgaggcctagcggcaaccccgtagcctcgcctcgtgtccggcttgaggcctagcgtggtgtccgccgccgcgtgccactccggccgcactatgcgttttttgtccttgctgccctcgattgccttccagcagcatgggctaacaaagggagggtgtggggctcactcttaaggagcccatgaagcttacgttggataggaatggaagggcaggaggggcgactggggcccgcccgccttcggagcacatgtccgacgccacctggatggggcgaggcctgtggctttccgaagcaatcgggcgtgagtttagcctacctgggccatgtggccctagcactgggcacggtctggcctggcggtgccgcgttcccttgcctcccaacaagggtgaggccgtcccgcccggcaccagttgcttgcgcggaaagatggccgctcccggggccctgttgcaaggagctcaaaatggaggacgcggcagcccggtggagcgggcgggtgagtcacccacacaaaggaagagggccttgcccctcgccggccgctgcttcctgtgaccccgtggtctatcggccgcatagtcacctcgggcttctcttgagcaccgctcgtcgcggcggggggaggggatctaatggcgttggagtttgttcacatttggtgggtggagactagtcaggccagcctggcgctggaagtcattcttggaatttgcccctttgagtttggagcgaggctaattctcaagcctcttagcggttcaaaggtattttctaaacccgtttccaggtgttgtgaaag

SEQ ID NO: 156 - DNA, 252 bp, Artificial Sequence
  Synthetic
gtgaaaaagaaaagaaaaaaaaggactgggccgcaggaggccggagaggaatggaaattaggaatggggggaaggacgctgtacgggtttaggggcgctggtgcgaggtccggaagccgagcccaggctccgcattgcagaggatggtagaggacgtgatggggcatgcggcgggaatggaggcgggtggggggaggggactggccacgctaatctgactttcttctcccgcagcctcttctcatagacaag

SEQ ID NO: 157 - DNA, 874 bp, Artificial Sequence
  Synthetic
gtgagtgtccgcggcgcggcaagacttggggactgtgacgagacttcggggcagcgggaggtggccggagcgggacccggaaaagaaaggagacatggctgcctctgcatgggtggcgggacgtggtcggctcgcggcgccatatctgcacctcctctgcccgtctttgggagtgtcggcctcctgaagttggagtgttttctctaattccttcgtccagctctcctttccgagaacgctggggtggctgtgggaggggcggcgtttgctgatgtggcagcggacataatgctgtatagccctgtgcccatggtgacagggtgatggtgctcccgggaagtgacagcctgcaggggtggctcacatggtgacctctagtgagctgagcctcttccgccctggcctttatctccttccttggtccgcacaatggaaccggtcccctccaagctgagaaaatggctcatgggcctaggggcctattgtggcctttgatcccagcatttgaccttggcgcacaaggcgggttggcagtgtgtagcaggcgaggttttgtcggcctgtgtgggccccatctcgtgcgggccccctgtcgcctgcattgttggactgctggggtggcagtccagcttggcgttgattacgtggtgcggtcacagcctaggctccctggtactcttgttctagttgtcattttggttagggttgggttcctgacacatctggtgactcttgatgcttcttaggtggtaggcttgtaggtgtgagtcgaatgagcgccagttttggggagacagctctttggaaccccacaatggggtgctatcgacccgagttcccagaatcagtcctgaccgcccttcccccaccacag

SEQ ID NO: 158 - DNA, 292 bp, Artificial Sequence
  Synthetic
gtaggctgagcaccgtggcgggcggcagcgggtggcggtcggggttgtttctggcggaggtgctgctgatgatgtaattaaagtaggcggtcttgagagggcggatggtcgaggtgaggtgtggcaggcttgagatccagctgttggggtgagtactccctctcaaaagcgggcattacttctgcgctaagattgtcagtttccaaaaacgaggaggatttgatattcacctggcccgatctggccatacacttgagtgacaatgacatccactttgcctttctctccacag

SEQ ID NO: 159 - DNA, 701 bp, Artificial Sequence
  Synthetic
gtactggcccacagccgtaaagagctgcgggggcgtgagaggggggaatgggtgaggtcaagctggaggcttcttggggttgggtgggccgctgaggggaggggagggcgaggtgacgcgacacccggcctttctgggagagtgggccttgttgacctaaggggggcgagggcagttggcacgcgcacgcgccgacagaaactaacagacattaaccaacagcgattccgtcgcgtttacttgggaggaaggcggaaaagaggtagtttgtgtggcttctggaaaccctaaatttggaatcccagtatgagaatggtgtcccttcttgtgtttcaatgggatttttacttcgcgagtcttgtgggtttggttttgttttcagtttgcctaacaccgtgcttaggtttgaggcagattggagttcggtcgggggagtttgaatatccggaacagttagtggggaaagctgtggacgcttggtaagagagcgctctggattttccgctgttgacgttgaaaccttgaatgacgaatttcgtattaagtgacttagccttgtaaaattgaggggaggcttgcggaatattaacgtatttaaggcattttgaaggaatagttgctaattttgaagaatattaggtgtaaaagcaagaaatacaatgatcctgaggtgacacgcttatgttttacttttaaactag

SEQ ID NO: 160 - DNA, 280 bp, Artificial Sequence
  Synthetic
tgtatactctatattatactctatgttatactctgtaatcctactcaataaacgtgtcacgcctgtgaaaccgtactaagtctcccgtgtcttcttatcaccatcaggtgacatcctcgcccaggctgtcaatcatgccggtatcgattccagtagcaccggccccacgctgacaacccactcttgcagcgttagcagcgcccctcttaacaagccgacccccaccagcgtcgcggttactaacactcctctccccggggcatccgctactcccgagctc

SEQ ID NO: 161 - DNA, 280 bp, Artificial Sequence
  Synthetic
tgtatactctatattatactctatgttatactctgtaatcctactcaataaacgtgtcacgcctgtgaaaccgtactaagtctcccgtgacttcttatcaccatcaggtgacatcctcgcccaggctgtcaatcatgccggtatcgattccagtagcaccggccccacgctgacaacccactcttgcagcgttagcagcgcccctcttaacaagccgacccccaccagcgtcgcggttactaacactcctctccccggggcatccgctactcccgagctc

SEQ ID NO: 162 - DNA, 328 bp, Artificial Sequence
  Synthetic
actattgtatatatatatcagttactgttatggatcccacgtcactattgtatactctatattatactctatgttatactctgtaatcctactcaataaacgtgtcacgcctgtgaaaccgtactaagtctcccgtgtcttcttatcaccatcaggtgacatcctcgcccaggctgtcaatcatgccggtatcgattccagtagcaccggccccacgctgacaacccactcttgcagcgttagcagcgcccctcttaacaagccgacccccaccagcgtcgcggttactaacactcctctccccggggcatccgctactcccgagctc

SEQ ID NO: 163 - DNA, 328 bp, Artificial Sequence
  Synthetic
actattgtatatatatatcagttactgttatggatcccacgtcactattgtatactctatattatactctatgttatactctgtaatcctactcaataaacgtgtcacgcctgtgaaaccgtactaagtctcccgtgtcttgttatcaccatcaggtgacatcctcgcccaggctgtcaatcatgccggtatcgattccagtagcaccggccccacgctgacaacccactcttgcagcgttagcagcgcccctcttaacaagccgacccccaccagcgtcgcggttactaacactcctctccccggggcatccgctactcccgagctc

SEQ ID NO: 164 - DNA, 343 bp, Artificial Sequence
  Synthetic
atccacaagcccagctccccacccatcaccatggacaatgtttttttactaacacttggacaatgatggatacttttttactaacacttggacaatgatgatgatacactcctcacctgcccacttagacacaattactaacaccacaccccctcttttatttctctgtacttaatgttttctgaataaagtgatcctattgtacccacattaaagacttctttaactctttatggttcacaggacccgagatgaacatagatattgttacagcagcggcctccatgtcaggtataactactgcctcacacagcgccctgccaatcagaagaccaaacacccc

SEQ ID NO: 165 - DNA, 331 bp, Artificial Sequence
  Synthetic
atccacaagcccagctccccacccatcaccatggacaatgtttttttactaacacttggacaatgatggatacttttttactaacacttggacaatgatgatgatacactcctcacttgcccacttagacacaattactaacaccacaccccctcttttatttctctgtacttaatgttttctgaataaagtgatcctattgtacccacattaaagacttctttaactctttatggttcacaggacccgagatgaacatagatattgttacagcagcggcctccatgtcaggtataactactgcctcacacagcgccctgccaatcagaag

SEQ ID NO: 166 - DNA, 270 bp, Artificial Sequence
  Synthetic
atattacccctaacacctgccaccccagtcttaatcagtggtggaagaacggtctcagaactgtttgtctcaattggccatttaagtttaatagtgaaagactggttaatgataacaatgcatcggaaaaccttcaggaggaaaggagaatgttttgtggaacatttttgtgtgtgtggcagttttaagttattagttttcaaaatcagtactttttaatggaaacaacttgaccaaaaatctgtcacagaattttgagacccattaaaa

SEQ ID NO: 167 - DNA, 292 bp, Artificial Sequence
  Synthetic
atattacccctaacacctgccaccccagtcttaatcagtggtggaagaacggtgtcagaactgtttgtctcaattggccatttaagtttaatagtgaaagactggttaatgataacaatgcatcggaaaaccttcaggaggaaaggagaatgttttgtggaacatttttgtgtgtgtggcagttttaagttattagttttcaaaatcagtactttttaatggaaacaacttgaccaaaaatctgtcacagaatttttagacccattaaaatacaagtttaatgagaagtctg

SEQ ID NO: 168 - DNA, 573 bp, Artificial Sequence
  Synthetic
attatccctaatacctgccaccccactcttaatcagtggtggaagaacggtctcagaactgtttgtttcaattggccatttaagtttagtagtaaaagactggttaatgataacaatgcatcgtaaaaccttcagaaggaaaggagaatgttttgtggaccactttggttttcttttttgcgtgtggcagttttaagttattagtttttaaaatcagtactttttaatggaaacaacttgaccaaaaatttgtcacagaattttgagacccattaaaaaagttaaatgagaaacctgtgtgttcctttggtcaacaccgagacatttaggtgaaagacatctaattctggttttacgaatctggaaacttcttgaaaatgtaattcttgagttaacacttctgggtggagaatagggttgttttccccccacataattggaaggggaaggaatatcatttaaagctatgggagggttgctttgattacaacactggagagaaatgcagcatgttgctgattgcctgtcactaaaacaggccaaaaactgagtccttgggttgcatagaaagct

SEQ ID NO: 169 - DNA, 280 bp, Artificial Sequence
  Synthetic
attatccctaatacctgccaccccactcttaatcagtggtggaagaacggtgtcagaactgtttgtttcaattggccatttaagtttagtagtaaaagactggttaatgataacaatgcatcgtaaaaccttcagaaggaaaggagaatgttttgtggaccactttggttttcttttttgcgtgtggcagttttaagttattagtttttaaaatcagtactttttaatggaaacaacttgaccaaaaatttgtcacagaattttgacacccattaaaaaa

SEQ ID NO: 170 - DNA, 186 bp, Artificial Sequence
  Synthetic
gcatatactgagattgagattaacttcctgtgaaacccagtgtcttagacaactgtggcttgagcaccacctgctggtattcattacaaacttgctcactacaataaatgaattttaagctttaagatgaagtggcatttcttttaacagttactatgttggaattggttacaaattttggagtgg

SEQ ID NO: 171 - DNA, 186 bp, Artificial Sequence
  Synthetic
gcatatactgagattgagattaacttcctgtgaaacccagtgtcttagacaactgtggcttgagcaccacctgttggtattcattacaaacttgctcactacaataaatgaattttaagctttaagatgaagtggcatttcttttaacagttactatgttggaattggttacaaattttggagtgg

SEQ ID NO: 172 - DNA, 337 bp, Artificial Sequence
  Synthetic
atattatccctaatacttgccaccccactcttaatcagtggtggaagaacggtgtcagaactgtttgtttcaattggccatttaagtttagtagtaaaagactggttaatgataacaatgcatcgtaaaaccttcagaaggaaaggagaatgttttgtggaccactttggttttcttttttgcgtgtggcagttttaagttattagtttttaaaatcagtactttttaatggaaacaacttgaccaaaaatttgtcacagaattttgagatccattaaaaaagttaaatgagaaacctgtgtgttcctttggtcaacaccgagacatttaggtgaaa

SEQ ID NO: 173 - DNA, 185 bp, Artificial Sequence
  Synthetic
ttgccagccatctgttgtttgcccctcccccgtgccttccttgaccctggaaggtgccactcccactgtcctttcctaataaaatgaggaaattgcatcgcattgtctgagtaggtgtcattctattctggggggtggggtggggcaggacagcaagggggaggattggcaagacaatagcaggc

SEQ ID NO: 174 - DNA, 251 bp, Artificial Sequence
  Synthetic
ttgccagccatctgttgtttgcccctcccccgtgccttccttgaccctggaaggtgccactcccactgtcctttcctaataaaatgaggaaattgcatcgcattgtctgagtaggtgtcattctattctggggggtggggtggggcaggacagcaagggggaggattgggaatacaatagcaggcatgctggggatgcggtgggctctatgggtacccaggtgctgaagaattgacccggttcctcctggg

SEQ ID NO: 175 - DNA, 99 bp, Artificial Sequence
  Synthetic
ttgccagccatctgttgtttgcccctcccccgtgccttccttgaccctggaaggtgccactcccactgtcctttcctaataaaatgaggaaattgcatc

SEQ ID NO: 176 - DNA, 479 bp, Artificial Sequence
  Synthetic
acgggtggcatccctgtgacccctccccagtgcctctcctggccctggaagttgccactccagtgcccaccagccttgtcctaataaaattaagttgcatcattttgtctgactaggtgtccttctataatattatggggtggaggggggtggtatggagcaaggggcaagttgggaagacaacctgtagggcctgcggggtctattgggaaccaagctggagtgcagtggcacaatcttggctcactgcaatctccgcctcctgggttcaagcgattctcctgcctcagcctcccgagttgttgggattccaggcatgcatgaccaggctcagctaatttttgtttttttggtagagacggggtttcaccatattggccaggctggtctccaactcctaatctcaggtgatctacccaccttggcctcccaaattgctgggattacaggcgtgaaccactgctcccttccctgtcctt

SEQ ID NO: 177 - DNA, 202 bp, Artificial Sequence
  Synthetic
ctgcccgggtggcatccctgtgacccctccccagtgcctctcctggccctggaagttgccactccagtgcccaccagccttgtcctaataaaattaagttgcatcattttgtctgactaggtgtccttctataatattatggggtggaggggggtggtatggagcaaggggcccaagttgggaagaaacctgtagggcctgc

SEQ ID NO: 178 - DNA, 210 bp, Artificial Sequence
  Synthetic
ctcgctttcttgctgtccaatttctattaaaggttcctttgttccctaagtccaactactaaactgggggatattatgaagggccttgagcatctggattctgcctaataaaaaacatttattttcattgcaatgatgtatttaaattatttctgaatattttactaaaaagggaatgtgggaggtcagtgcatttaaaacataaagaaa

SEQ ID NO: 179 - DNA, 210 bp, Artificial Sequence
  Synthetic
ctcgctttcttgctgtccaatttctattaaaggttcctttgttccctaagtccaactactaaactgggggatattatgaagggccttgagcatctggattctgcctaataaaaaacatttattttcattgcaatgatgtatttaaattatttctgaatattttactaaaaagggaatgtgggagatcagtgcatttaaaacataaagaaa

SEQ ID NO: 180 - DNA, 387 bp, Artificial Sequence
  Synthetic
tggctaataaaggaaatttattttcattgcaatagtgtgttggaattttttgtgtctctcactcggaaggacatatgggagggcaaatcatttaaaacatcagaatgagtatttggtttagagtttggcaacatatgcccatatgctggctgccatgaacaaaggttggctataaagaggtcatcagtatatgaaacagccccctgctgtccattccttattccatagaaaagccttgacttgaggttagattttttttatattttgttttgtgttatttttttctttaacatccctaaaattttccttacatgttttactagccagatttttcctcctctcctgactactcccagtcatagctgtccctcttctcttatggagatc

SEQ ID NO: 181 - DNA, 527 bp, Artificial Sequence
  Synthetic
ttcactcctcaggtgcaggctgcctatcagaaggtggtggctggtgtggccaatgccctggctcacaaataccactgagatctttttccctctgccaaaaattatggggacatcatgaagccccttgagcatctgacttctggctaataaaggaaatttattttcattgcaatagtgtgttggaattttttgtgtctctcactcggaaggacatatgggagggcaaatcatttaaaacatcagaatgagtatttggtttagagtttggcaacatatgcccatatgctggctgccatgaacaaaggttggctataaagaggtcatcagtatatgaaacagccccctgctgtccattccttattccatagaaaagccttgacttgaggttagattttttttatattttgttttgtgttatttttttctttaacatccctaaaattttccttacatgttttactagccagatttttcctcctctcctgactactcccagtcatagctgtccctcttctcttatggagatc

SEQ ID NO: 182 - DNA, 387 bp, Artificial Sequence
  Synthetic
tggctaataaaggaaatttattttcattgcaatagtgtgttggaattttttgtgtctctcactcggaagaacatatgggagggcaaatcatttaaaacatcagaatgagtatttggtttagagtttggcaacatatgcccatatgctggctgccatgaacaaaggttggctataaagaggtcatcagtatatgaaacagccccctgctgtccattccttattccatagaaaagccttgacttgaggttagattttttttatattttgttttgtgttatttttttctttaacatccctaaaattttccttacatgttttactagccagatttttcctcctctcctgactactcccagtcatagctgtccctcttctcttatggagatc

SEQ ID NO: 183 - DNA, 387 bp, Artificial Sequence
  Synthetic
aggctaataaaggaaatttattttcattgcaatagtgtgttggaattttttgtgtctctcactcggaaggacatatgggagggcaaatcatttaaaacatcagaatgagtatttggtttagagtttggcaacatatgcccatatgctggctgccatgaacaaaggttggctataaagaggtcatcagtatatgaaacagccccctgctgtccattccttattccatagaaaagccttgacttgaggttagattttttttatattttgttttgtgttatttttttctttaacatccctaaaattttccttacatgttttactagccagatttttcctcctctcctgactactcccagtcatagctgtccctcttctcttatggagatc

SEQ ID NO: 184 - DNA, 99 bp, Artificial Sequence
  Synthetic
gacctctggctaataaaggaaatttattttcattgcaatagtgtgttggaattttttgtgtctctcactcggaaggacatatgggagggcaaatcattt

SEQ ID NO: 185 - DNA, 155 bp, Artificial Sequence
  Synthetic
gtgcgacggccggcaagcccccgctccccgggctctcgcggtcgcacgaggatgcttggcacgtaccccctgtacatacttcccgggcgcccagcatggaaataaagcacccagcgctgccctgggcccctgcgagactgtgatggttctttcca

SEQ ID NO: 186 - DNA, 860 bp, Artificial Sequence
  Synthetic
agggagaagtgcccccacctgctcctcagttccagcctgaccccctcccatcctttggcctctgaccctttttccacaggggacctacccctattgcggtcctccagctcatctttcacctcacccccctcctcctccttggctttaattatgctaatgttggaggagaatgaataaataaagtgaatctttgcacctgtggtttctctctttcctcatttaataattattatctgttgttttaccaactactcaatttctcttataagggactaaatatgtagtcatcctaaggcgcataaccatttataaaaatcatccttcattctattttaccctatcatcctctgcaagacagtcctccctcaaacccacaagccttctgtcctcacagtcccctgggccatggtaggagagacttgcttccttgttttcccctcctcagcaagccctcatagtcctttttaagggtgacaggtcttacagtcatatatcctttgattcaattccctgagaatcaaccaaagcaaatttttcaaaagaagaaacctgctataaagagaatcattcattgcaacatgatataaaataacaacacaataaaagcaattaaataaacaaacaatagggaaatgtttaagttcatcatggtacttagacttaatggaatgtcatgccttatttacatttttaaacaggtactgagggactcctgtctgccaagggccgtattgagtactttccacaacctaatttaatccacactatactgtgagattaaaaacattcattaaaatgttgcaaaggttctataaagctgagagacaaatatattctataactcagcaatcccacttcta

SEQ ID NO: 187 - DNA, 983 bp, Artificial Sequence
  Synthetic
gtgcgacggccggcaagcccccgctccccgggctctcgcggtcgcacgaggatgcttggcacgtaccccctgtacatacttcccgggcgcccagcatggaaataaagcacccagcgctgccctgggcccctgcgagactgtgatggttctttccacgggtcaggccgagtctgaggcctgagtggcatgagggaggcagagcgggtcccactgtccccacactggcccaggctgtgcaggtgtgcctgggccgcctagggtggggctcagccaggggctgccctcggcagggtgggggatttgccagcgtggccctccctccagcagcacctgccctgggctgggccacgggaagccctaggagcccctggggacagacacacagcccctgcctctgtaggagactgtcctgttctgtgagcgccctgtcctccgacctccatgcccactcgggggcatgcctagtccatgtgcgtagggacaggccctccctcacccatctacccccacggcactaacccctggctgccctgcccagcctcgcacccgcatggggacacaaccgactccggggacatgcactctcgggccctgtggagggactggtgcagatgcccacacacacactcagcccagacccgttcaacaaaccccgcactgaggttggccggccacacggccaccacacacacacgtgcacgcctcacacacggagcctcacccgggcgaactgcacagcacccagaccagagcaaggtcctcgcacacgtgaacactcctcggacacaggcccccacgagccccacgcggcacctcaaggcccacgagcctctcggcagcttctccacatgctgacctgctcagacaaacccagccctcctctcacaagggtgcccctgcagccgccacacacacacaggggatcacacaccacgtcacgtccctggccctggcccacttcccagtgccgcccttccctgcag

SEQ ID NO: 188 - DNA, 223 bp, Artificial Sequence
  Synthetic
cagacatgataagatacattgatgagtttggacaaaccacaactagaatgcagtgaaaaaaatgctttatttgtgaaatttgtgatgctattgctttatttgtaaccattataagctgcaataaacaagttaacaacaacaattgcattcattttatgtttcaggttcagggggagatgtgggaggttttttaaagcaagtaaaacctctacaaatgtggtaa

SEQ ID NO: 189 - DNA, 222 bp, Artificial Sequence
  Synthetic
cagacatgataagatacattgatgagtttggacaaaccacaactagaatgcagtgaaaaaaatgctttatttgtgaaatttgtgatgctattgctttatttgtaaccattataagctgcaataaacaagttaacaacaacaattgcattcattttatgtttcaggttcagggggaggtgtgggaggttttttaaagcaagtaaaacctctacaaatgtggta

SEQ ID NO: 190 - DNA, 129 bp, Artificial Sequence
  Synthetic
aacttgtttattgcagcttataatggttacaaataaagcaatagcatcacaaatttcacaaataaagcatttttttcactgcattctagttgtggtttgtccaaactcatcaatgtatcttatcatgtc

SEQ ID NO: 191 - DNA, 249 bp, Artificial Sequence
  Synthetic
gacatgataagatacattgatgagtttggacaaaccacaactagaatgcagtgaaaaaaatgctttatttgtgaaatttgtgatgctattgctttatttgtgaaatttgtgatgctattgctttatttgtaaccattataagctgcaataaacaagttaacaacaacaattgcattcattttatgtttcaggttcagggggaggtgtgggaggttttttaaagcaagtaaaacctctacaaatgtggta

SEQ ID NO: 192 - DNA, 271 bp, Artificial Sequence
  Synthetic
gggggaggctaactgaaacacggaaggagacaataccggaaggaacccgcgctatgacggcaataaaaagacagaataaaacgcacgggtgttgggtcgtttgttcataaacgcggggttcggtcccagggctggcactctgtcgataccccaccgagaccccattggggccaatacgcccgcgtttcttccttttccccaccccaccccccaagttcgggtgaaggcccagggctcgcagccaacgtcggggcggcaggccctgccatag

SEQ ID NO: 193 - DNA, 271 bp, Artificial Sequence
  Synthetic
gggggaggctaactgaaacacggaaggagacaataccggaaggaacccgcgctatgacggcaataaaaagacagaataaaacgcacgggtgttgggtcgtttgttcataaacgcggggttcggtcccagggctggcactctgtcgataccccaccgagtccccattggggccaatacgcccgcgtttcttccttttccccaccccaccccccaagttcgggtgaaggcccagggctcgcagccaacgtcggggcggcaggccctgccatag

SEQ ID NO: 194 - DNA, 194 bp, Artificial Sequence
  Synthetic
gcggccgcgtcgaaattcacgcgtaagcttctcgaccgggagatgggggaggctaactgaaacacggaaggagacaataccggaaggaacccgcgctatgacggcaataaaaagacagaataaaacgcacgggtgttgggtcgtttgttcataaacgcggggttcgggatctcgaggctagtctcgtgatcgat

SEQ ID NO: 195 - DNA, 223 bp, Artificial Sequence
  Synthetic
taccacatttgtagaggttttacttgctttaaaaaacctcccacacctccccctgaacctgaaacataaaatgaatgcaattgttgttgttaacttgtttattgcagcttataatggttacaaataaagcaatagcatcacaaatttcacaaataaagcatttttttcactgcattctagttgtggtttgtccaaactcatcaatgtatcttatcatgtctgg

SEQ ID NO: 196 - DNA, 279 bp, Artificial Sequence
  Synthetic
gctggagcctcggtagccgttcctcctgcccgctgggcctcccaacgggccctcctcccctccttgcaccggcccttcctggtctttgaataaagtctgagtgggcggcagcctgtgtgtgcctgggttctctctgtcccggaatgtgccaacaatggaggtgtttacctgtctcagaccaaggacctctctgcagctgcatggggctggggagggagaactgcagggagtatgggaggggaagctgaggtgggcctgctcaagagaaggtgctgaacc

SEQ ID NO: 197 - DNA, 255 bp, Artificial Sequence
  Synthetic
ctgtcttctcagcctcgactgtgccttctagttgccagccatctgttgtttgcccctcccccgtgccttccttgaccctggaaggtgccactcccactgtcctttcctaataaaatgaggaaattgcatcaaatcgataatatatggtagggttcatagccagagtaacctttttttttaatttttattttattttatttttgagtcgggcgcgccaaaatgaagtgaagttcctatactttctagagaagacag

SEQ ID NO: 198 - DNA, 449 bp, Artificial Sequence
  Synthetic
gatccttttccctctgaccagaattatgggaacatcatgaagccccttgagcatctagcttctggctaataaaggaaatttattttcattgcaatagtgtgttggaattttttgtgtctctcactcggaaggacatatgggagggcaaatcatttaaaacatcagaatgagtatttggtttagagtttggcaacatatgcccatatgctggctgccatgaacaaaggttggctataaagaggtcatcagtatatgaaacagccccctgctgtccattccttattccatagaaaagccttgacttgaggttagattttttttatattttgttttgtgttatttttttctttaacatccctaaaattttccttacatgttttactagccagatttttcctcctctcctgactactcccagtcatagctgtccctcttctcttatggagatc

SEQ ID NO: 199 - DNA, 449 bp, Artificial Sequence; identical to SEQ ID NO: 198
  Synthetic

SEQ ID NO: 200 - DNA, 330 bp, Artificial Sequence
  Synthetic
ctgtacttggctcactctccttctccttacataggaaattacccagttatgaaattaataaaaagccagtgatccccacatttgtctgtgcctctgcctaggggctggcctgggaggggagaaaaaggccagaataattccaggaaccgccaagaaggcaggtcagagatcttgctggacaaacagtggctgaactctgttccttaacagagtcagcagcagggggaggggggggcggcgcgcagtgtggatcttatatctagtccccagggggagggggcaataaaagatctttattttcattagatctgtgtgttggttttttgtgtg

SEQ ID NO: 201 - DNA, 353 bp, Artificial Sequence
  Synthetic
ttgacttgactcatgcttgtttcactttcacatggaatttcccagttatgaaattaataaaaatcaatggtttccacatctgtgtgtgcctgtgtcaccgacccaggtagggctggccttgggggagggggaggccagaatgactccaagagctacaggaaggcaggtcagagatcccactggacaaacagtggctggactctgcaccataacacacaatcaacaggggagtgagctggatccagggggaggggggggcggcgcgcagtgtggatcttatatctagtccccagggggagggggcaataaaagatctttattttcattagatctgtgtgttggttttttgtgtg

SEQ ID NO: 202 - DNA, 284 bp, Artificial Sequence
  Synthetic
ttgacttgactcatgcttgtttcactttcacatggaatttcccagttatgaaattaataaaaatcaatggtttccacatctgtgtgtgcctgtgtcaccgacccaggtagggctggccttgggggagggggaggccagaatgactccaagagctacaggaaggcaggtcagagaagggggaggggggggcggcgcgcagtgtggatcttatatctagtccccagggggagggggcaataaaagatctttattttcattagatctgtgtgttggttttttgtgtg

SEQ ID NO: 203 - DNA, 280 bp, Artificial Sequence; identical to SEQ ID NO: 160
  Synthetic

SEQ ID NO: 204 - DNA, 347 bp, Artificial Sequence
  Synthetic
ctgtcttcatccacaagcccagctccccacccatcaccatggacaatgtttttttactaacacttggacaatgatggatacttttttactaacacttggacaatgatgatgatacactcctcacttgcccacttagacacaattactaacaccacaccccctcttttatttctctgtacttaatgttttctgaataaagtgatcctattgtacccacattaaagacttctttaactctttatggttcacaggacccgagatgaacatagatattgttacagcagcggcctccatgtcaggtataactactgcctcacacagcgccctgccaatcagaaggaagacag

SEQ ID NO: 205 - DNA, 332 bp, Artificial Sequence
  Synthetic
ctgtcttcccacagacctggtgaccgtcaggaagaagattcagtgagaggacacgaggtatgtcatggtttttaatcaataaataaagaggttttattcatcggacagtcgttgtagcctgtaaaagactcgccccggagggggttcccccgatgtgaggggcatgcagtagtatggtgtcctgagtgtctcggatgcgtccttgaactcgcactctaccgccgtgggggttaataaagttttgctgcgccggtagggggggaggccgaggataataaagttgctacgtactggttgaagtctaacaatctctcggggggatccgaagacag

SEQ ID NO: 206 - DNA, 138 bp, Artificial Sequence
  Synthetic
ctgtcttctcagcctcgactgtgccttctagttgccagccatctgttgtttgcccctcccccgtgccttccttgaccctggaaggtgccactcccactgtcctttcctaataaaatgaggaaattgcatcgaagacag

SEQ ID NO: 207 - DNA, 403 bp, Artificial Sequence
  Synthetic
ctgtcttctggctaataaaggaaatttattttcattgcaatagtgtgttggaattttttgtgtctctcactcggaaggacatatgggagggcaaatcatttaaaacatcagaatgagtatttggtttagagtttggcaacatatgcccatatgctggctgccatgaacaaaggttggctataaagaggtcatcagtatatgaaacagccccctgctgtccattccttattccatagaaaagccttgacttgaggttagattttttttatattttgttttgtgttatttttttctttaacatccctaaaattttccttacatgttttactagccagatttttcctcctctcctgactactcccagtcatagctgtccctcttctcttatggagatcgaagacag

SEQ ID NO: 208 - DNA, 287 bp, Artificial Sequence
  Synthetic
ctgtcttcgggggaggctaactgaaacacggaaggagacaataccggaaggaacccgcgctatgacggcaataaaaagacagaataaaacgcacgggtgttgggtcgtttgttcataaacgcggggttcggtcccagggctggcactctgtcgataccccaccgagtccccattggggccaatacgcccgcgtttcttccttttccccaccccaccccccaagttcgggtgaaggcccagggctcgcagccaacgtcggggcggcaggccctgccataggaagacag

SEQ ID NO: 209 - DNA, 462 bp, Artificial Sequence
  Synthetic
tcttctttctagactgaccaaagactttttgtcaacttgtacaatctgaagcaatgtctggcccacagacagctgagctgtaaacaaatgtcacatggaaataaatactttatcttgtgaactcactttattgtgaaggaatttgttttgtttttcaaacctttcctgcggtgttgacagcccaaggattatctgaatagagcctaggaactggaaatggaacagtgcagtctgatggtacttaagggagaaagagggaaaggaggtgtggaagaagaaaaaagagaagcaaggggggggggagaaagggagagggagagggagagggagagggagagggagagggagagggagagggagagggagagggagagggagagggagggggagagagagagagagagagagagagagagagagagagagagagagagagagagagagcatgcactctaacagcaa

SEQ ID NO: 210 - DNA, 463 bp, Artificial Sequence
  Synthetic
tcttctttctagactgaccaaagactttttgtcaacttgtacaatctgaagcaatgtctggcccacagacagctgagctgtaaacaaatgtcacatggaaataaatactttatcttgtgaactcactttattgtgaaggaatttgttttgtttttcaaacctttcctgcggtgttgacagcccaaggattatctgaatagagcctaggaactggaaatggaacagtgcagtctgatggtacttaagggagaaagagggaaaggaggtgtggaagaagaaaaaagagaagcaagggggagggggagaaagggagagggagagggagagggagagggagagggagagggagagggagagggagagggagagggagagggagggggagggggagagagagagagagagagagagagagagagagagagagagagagagagagagagagcatgcactctaacagcaa

SEQ ID NO: 211 - DNA, 415 bp, Artificial Sequence
  Synthetic
tcttctttctagactgaccaaagactttttgtcaacttgtacaatctgaagcaatgtctggcccacagacagctgagctgtaaacaaatgtcacatggaaataaatactttatcttgtgaactcactttattgtgaaggaatttgttttgtttttcaaacctttcctgcggtgttgacagcccaaggattatctgaatagagcctaggaactggaaatggaacagtgcagtctgatggtacttaagggagaaagagggaaaggaggtgtggaagaagaaaaaagagaagcaagggggagggggagaaagggagagggagagggagagggagagggagagggagagggagagggagagggagagggagagggagagggagggggagggggagagagagcatgcactctaacagcaa

SEQ ID NO: 212 - DNA, 463 bp, Artificial Sequence
  Synthetic
tcttctttctagactgaccaaagactttttgtcaacttgtacaatctgaagcaatgtctggcccacagacagctgagctgtaaacaaatgtcacatggaaataaatactttatcttgtgaactcactttattgtgaaggaatttgttttgtttttcaaacctttcctgcggtgttgacagcccaaggattatctgaatagagcctaggaactggaaatggaacagtgcagtctgatggtacttaagggagaaagagggaaaggaggtgtggaagaagaaaaaagagaagcacgggggagggggagaaagggagagggagagggagagggagagggagagggagagggagagggagagggagagggagagggagagggagggggagggggagagagagagagagagagagagagagagagagagagagagagagagagagagagagcatgcactctaacagcaa

SEQ ID NO: 213 - DNA, 461 bp, Artificial Sequence
  Synthetic
tcttctttctagactgaccaaagactttttgtcaacttgtacaatctgaagcaatgtctggcccacagacagctgagctgtaaacaaatgtcacatggaaataaatactttatcttgtgaactcactttattgtgaaggaatttgttttgtttttcaaacctttcctgcggtgttgacagcccaaggattatctgaatagagcctaggaactggaaatggaacagtgcagtctgatggtacttaagggagaaagagggaaaggaggtgtggaagaggaaagaagagaagcaagggggagggggagaaagggagagggagagggagagggagagggagagggagagggagagggagagggagagggagagggagagggagggggagggggagagagagagagagagagggagagagagagagagagagagagagagagagagagcatgcactctaacagcaa

SEQ ID NO: 214 - DNA, 147 bp, Artificial Sequence
  Synthetic
ctgtcttcccaacttgtttattgcagcttataatggttacaaataaagcaatagcatcacaaatttcacaaataaagcatttttttcactgcattctagttgtggtttgtccaaactcatcaatgtatcttatcatgtcgaagacag

SEQ ID NO: 215 - DNA, 239 bp, Artificial Sequence
  Synthetic
ctgtcttccagacatgataagatacattgatgagtttggacaaaccacaactagaatgcagtgaaaaaaatgctttatttgtgaaatttgtgatgctattgctttatttgtaaccattataagctgcaataaacaagttaacaacaacaattgcattcattttatgtttcaggttcagggggagatgtgggaggttttttaaagcaagtaaaacctctacaaatgtggtaagaagacag

SEQ ID NO: 216 - DNA, 231 bp, Artificial Sequence
  Synthetic
cagacatgataagatacattgatgagtttggacaaaccacaactagaatgcagtgaaaaaaatgctttatttgtgaaatttgtgatgctattgctttatttgtaaccattataagctgcaataaacaagttaacaacaacaattgcattcattttatgtttcaggttcagggggagatgtgggaggttttttaaagcaagtaaaacctctacaaatgtggtaagaagacag

SEQ ID NO: 217 - DNA, 65 bp, Artificial Sequence
  Synthetic
ctgtcttcaataaaagatctttattttcattagatctgtgtgttggttttttgtgtggaagacag

SEQ ID NO: 218 - DNA, 2836 bp, Artificial Sequence
  Synthetic
ctcatgaccaaaatcccttaacgtgagttacgcgcgcgtcgttccactgagcgtcagaccccgtagaaaagatcaaaggatcttcttgagatcctttttttctgcgcgtaatctgctgcttgcaaacaaaaaaaccaccgctaccagcggtggtttgtttgccggatcaagagctaccaactctttttccgaaggtaactggcttcagcagagcgcagataccaaatactgttcttctagtgtagccgtagttagcccaccacttcaagaactctgtagcaccgcctacatacctcgctctgctaatcctgttaccagtggctgctgccagtggcgataagtcgtgtcttaccgggttggactcaagacgatagttaccggataaggcgcagcggtcgggctgaacggggggttcgtgcacacagcccagcttggagcgaacgacctacaccgaactgagatacctacagcgtgagctatgagaaagcgccacgcttcccgaagggagaaaggcggacaggtatccggtaagcggcagggtcggaacaggagagcgcacgagggagcttccagggggaaacgcctggtatctttatagtcctgtcgggtttcgccacctctgacttgagcgtcgatttttgtgatgctcgtcaggggggcggagcctatggaaaaacgccagcaacgcggcctttttacggttcctggccttttgctggccttttgctcacatgttctttcctgcgttatcccctgattctgtggataaccgtattaccgcctttgagtgagctgataccgctcaaggctgagcggccgcttaaccctttcactgccagccgatttgtcccaaagtggaacttgtattgccagacagtttttgaacgttttgcactgtttcactttaggggcctttcctcgaggggacttttagtttacccaggaaaacaatatattgtttttttcagaacaacctaagctttcaaaatatggtagaatttttgtgtaattccaattctgtaacaagatataggcttctaaatgtctaaaaatgcaaacctaggtggagtgtggaactgaacctccgtgggagtcttgagtgtgccaggccctctctccgtgaaggaggcaatgcctgtgggcgtcgccgttgccgggacggtctggcacacgcaggcgtgtggctctcgttcatttccacgtagaagtccagagcgacaccccagagaggagatgcctccccggcgtgatggcctgacgatggattcccgcgtgcggcaacgtggggagtctgcagtgtggccggtttggaacctggcaaggagagcgaaggcaccgtgccgggcttgcacccttccctgcatgtttccgggtgcccgcagagctccgggagcaaacagtcggcatggccagcctttcgggggccggagagacttgagcaacaggccgccttgcggagggcaaagccacgcggaaaccaaaatcacgcctccgtcgtcctgcgtgtggctcctccgtggccggggctgtcggcctcgcgccgcgttgcagggctcagcctggggatgtgcggtctgtgaaccgcgcgggtgaacacccgacggcaacccgagtcccggtcttttgtcccggaggaaaccgcccactccctgggccacggaaccggggcgaatgggtggtgccccgccggccggcgcggcggctgtgggcccagccctcagcccgcgccggacgctgaccgttttcccggagggcgggggtcccgctactcccggaggccgaggaccgcttttcctccctgccttcctccccccgttccccggctccctcccgcccgcccccagtccctgcgtcgctctgtctttccctccgttcctccctgcctccctgcctccctccctccctcctaacgtccctccgcccgtccttccgcccctctaggactcccgttcctctctccatctctgcccgccttccctcccgcctggaacgctcagcgtccccggtgtgcgccgggcctggggtctgcgttccgccgccaggcgctccgtgctggcacctgggcggctgcaggggcccgggcgggcgggcgacggtggcgcgggggcgcataggaggcgagccgccggagcggtgtcaggcccggacgctgcgcggggcccggtgtttcgcgggacgggggtcaccacccagcccaggggacgacgcgttttccgggggtggggggtggggggtggggagggggcggtcaggcggcggggtgggctggtggagaggcaggagagctctgcccgggctgctcccacagcccaggcggctgcccgcaaacccgcgcgtgcgcagtaggcggcccacctggtgttcagcgaagggcgacacaaaattttctgatctccataagagaagagggacagctatgactgggagtagtcaggagaggaggaaaaatctggctagtaaaacatgtaaggaaaattttagggatgttaaagaaaaaaataacacaaaacaaaatataaaaaaaatctaacctcaagtcaaggcttttctatggaataaggaatggacagcagggggctgtttcatatactgatgacctctttatagccaacctttgttcatggcagccagcatatgggcatatgttgccaaactctaaaccaaatactcattctgatgttttaaatgatttgccctcccatatgttcttccgagtgagagacacaaaaaattccaacacactattgcaatgaaaataaatttcctttattagccattaattaactctggagacggcacatcgcccacagtccccgagaagttgggaggggtcggc

SEQ ID NO: 219 - DNA, 5861 bp, Artificial Sequence
  Synthetic
cgtctcaggggatgcccccgccccgcctgctgttcttcctcctcttcctgaccccaatggaagtccgccctgaggaaccgctcgtcgtgaaagtggaagaaggagacaacgccgtgcttcagtgcctcaagggcacctccgacgggccgacccagcaactcacttggagcagagagagcccgctcaagcccttcctgaaactgagcttggggcttccggggctgggtattcatatgcggcccctcgcaatctggttgtttatctttaacgtgtcacagcagatgggtggcttttacctgtgccagcccgggcctccttcggaaaaggcctggcagcctggatggactgtgaatgtcgaaggctcgggagagctgttcagatggaacgtgtccgacctgggaggcttgggctgcggtctgaagaacagatcctccgaggggccgagctccccctccggaaagctgatgtcacctaagctctacgtgtgggctaaggacaggcccgagatttgggaaggggagccgccttgtttgcctcctcgggactcactcaaccagtcgctgagccaggatctcactatggcccccgggtccacgctgtggctgtcctgcggagtccccccggactcagtgtcgagaggacccctgtcgtggacgcacgtgcatccgaagggccctaagagcctgctgagccttgagctgaaggacgaccgccccgcaagggatatgtgggtcatggaaaccggactgctcctgccgcgggcgaccgcccaagatgccggaaagtattactgccaccgcggcaacctgactatgagcttccacctggaaattaccgcgcggccagtgctgtggcactggctgctgcggactggcggatggaaagtgtccgccgtgaccctggcttacctgatcttctgcctgtgttccctcgtgggaattctccatctgcaacgcgctctcgtgctgcggcgcaagcgcaagcggatgaccgacccaactagaaggttcttcaaggtcaccccgccgcccggctcggggccacagaatcagtacggcaacgtgctgtcactgccgacccccacttccggcctgggacgggcacaacgctgggccgcgggcctcggtggcaccgccccgtcctacggcaacccgtcctccgacgtgcaagccgatggtgccctggggtcccgctcccctccgggagtgggacccgaagaagaagagggagagggttacgaagaacccgactcagaagaggactccgaattctacgaaaacgatagcaacctgggacaggatcagctgtcccaagacggatcgggctacgagaaccccgaggacgaacccctgggaccagaggatgaggactccttctccaatgctgagtcgtacgagaacgaggacgaagaactgacacagccagtggccaggaccatggacttcctttcccctcacggttcggcgtgggacccgtcccgcgaggccacctccctgggaagccagtcatacgaagatatgcggggcatcctctacgcggcgccgcagcttagatcgatccgaggacagcctggacccaaccacgaagaggacgccgactcctatgaaaacatggacaaccctgatggacctgaccctgcctgggggggtggcggccggatgggcacctggtctacccggtaatgaggttaattgccagccatctgttgtttgcccctcccccgtgccttccttgaccctggaaggtgccactcccactgtcctttcctaataaaatgaggaaattgcatcgcattgtctgagtaggtgtcattctattctggggggtggggtggggcaggacagcaagggggaggattgggaatacaatagcaggcatgctggggatgcggtgggctctatgggtacccaggtgctgaagaattgacccggttcctcctgggttataatggttacaaataaagcaatagcatcacaaatttcacaaataaagcatttttttcactgcattctagttgtggtttgtccaaactcatcaatgtatcttatcatgtctggaagacaccacaggtaccaatattctcactgactccgtcctggagttggatgagagataatggccttacgttgtgccaggggagggtcgggctggatttagcaagatttaccttctccaaagagcggtgctgcagtggcacagctgcccacggaggtgggggggtcaccgtccctggaggtgatgaagaactgtggggatgtggcactgagggacatggccagtgggcacggtgggtgggttggggttggtcttggggatcttggagggcttttccagccttcatgatttgacgattgtatgaacatctacatggcaattctccagctgcctgtcccagtcctactgacccagctgtatctctccaggcaagcacttccaccccttctgcttgcatccagacaccatcaaacatgcaggctcagacacagggaccagcagtgtctgtggcctttttgtgctcctctccatgctgggttttaacttgctctttgtccttctatcctatcttcttatccttaaggctgttctgaacgctgtgacttggagagtgtcccagagccctcaacaccagcatgtcccacgtccatgctgtcctgcacttccttatccccaagatctgcctctccgtgatgcactgaattggcaaacatgtgtcaccccagaccaacaatgtcacagcaaactcccccttgataggacaagggggaatggctttacactgagacaggggaggtttgggttggatatgaggaggcagtttttcccccagagggtggtgacgcactgaacaggttgcccaaggaggctgtggatgccccatccctgcaggcattcaaggccaggctggatgtggctctgggcagcctgggctgctggttgatgaccctgcacatagcagggggttggatctggatgagcactgtgctcctttgcaacccaggccgttctatgattctgtcattctaaatctctctttcagcctaaagctttttccccgtatccccccaggtgtctgcaggctcaaagagcagcgagaagcgttcagaggaaagcgatcccgtgccaccttccccgtgcccgggctgtccccgcacgctgccggctcggggatgcggggggagcgccggaccggagcggagccccgggcggctcgctgctgccccctagcgggggagggacgtaattacatccctgggggctttgggggggggctgtccccgtgagctcgcgctagcgacagcccccccggctcgttgcccagaggggctgtcatcgctagaaactctctgcagcggcggcacatgctgccgctgcagagagaagaattaaaatgccaacaacgtatgggacgcgtcgttggcatttaagcccttttactgccacgacgtatcccatgcgtgattggcaggcaaagggttaaggcgcgccgatgcaatttcctcattttattaggaaaggacagtgggagtggcaccttccagggtcaaggaaggcacgggggaggggcaaacaacagatggctggcaagagagcaggtttactgataggtatcgagatcgacggccttgaccacttccaccaggcacatgtgatctctcctctcatcgcggtctttggagagcttagtgtgataagtgatatgatggtagcgcggaatgtggacagccgctgaaccggccagtggccgattcatctggctacacttggtcaccagcttctccgtcaccccctcgatgtcgtaggcttgattgaactccacgcggattccgttgttcacagtgtcggggagaatgtaaaggatgctgggagggcactggaaggcgacattcttccgaagaatatgcccgtccttcttaaagttttctccagtcagagtcacccggttgtagatagatcccctctcataggtgaccatcgcgcgggtcttgtacactccatctccctcaaaagaaatggtgcgctcttgggtataaccttccggcatggcggatttgaagaagtccttaatgtggctagggtacttagcaaaacactgcactccatacgagagggttgacacaagggtggcccaaggcactggcagatctccagtggtacagatatacttggccttaatggttccagtcgtagcgtccccggttccttctcccttgatgatgaacttcattccttcgacgtccccttccagctcggtgatgtacggaatctccttctcaaacagcttagcaccttcggtcagggcagtcatggtggcggcgtcactcttggcacggggaatccgcgttccaatgcaccgttcccggccgcggaggctggatcggtcccggtgtcttctatggaggtcaaaacagcgtggatgggctctccaggcgatctgacggttcactaaacgagctctgcttatatagacctcccaccgtacacgcctaccgcccatttgcgtcaatggggcggagttgttacgacattttggaaagtcccgttgattttggtgccaaaacaaactcccattgacgtcaatggggtggagacttggaaatccccgtgagtcaaaccgctatccacgcccattgatgtactgccaaaaccgcatcaccatggtaatagcgatgactaatacgtagatgtactgccaagtaggaaagtcccgtaaggtcatgtactgggcataatgccaggcgggccatttaccgtcattgacgtcaatagggggcggacttggcatatgatacacttgatgtactgccaagtgggcagtttaccgtaaatactccacccattgacgtcaatggaaagtccctattggcgttactatgggaacatacgtcattattgacgtcaatgggcgggggtcgttgggcggtcagccaggcgggccatttaccgtaagtcgtctacagagccccgtacgccagagcccccgcagtgtcgacaattaatcatcggcatagtatatcggcatagtataatacgacaaggtgaggaagtaaaaaatgagccatatccaacgggaaacgtcgaggccgcgattaaattccaacatggatgctgatttatatgggtataaatgggctcgcgataatgtcgggcaatcaggtgcgacaatctatcgcttgtatgggaagcccgatgcgccagagttgtttctgaaacatggcaaaggtagcgttgccaatgatgttacagatgagatggtcagactaaactggctgacggaatttatgccacttccgaccatcaagcattttatccgtactcctgatgatgcatggttactcaccactgcgatccccggaaaaacagcgttccaggtattagaagaatatcctgattcaggtgaaaatattgttgatgcgctggcagtgttcctgcgccggttgcactcgattcctgtttgtaattgtccttttaacagcgatcgcgtatttcgcctcgctcaggcgcaatcacgaatgaataacggtttggttgatgcgagtgattttgatgacgagcgtaatggctggcctgttgaacaagtctggaaagaaatgcataaacttttgccattctcaccggattcagtcgtcactcatggtgatttctcacttgataaccttatttttgacgaggggaaattaataggttgtattgatgttggacgagtcggaatcgcagaccgataccaggatcttgccatcctatggaactgcctcggtgagttttctccttcattacagaaacggctttttcaaaaatatggtattgataatcctgatatgaataaattgcagtttcatttgatgctcgatgagtttttctaa

SEQ ID NO: 220 - DNA, 2795 bp, Artificial Sequence
  Synthetic
ctcatgaccaaaatcccttaacgtgagttacgcgcgcgtcgttccactgagcgtcagaccccgtagaaaagatcaaaggatcttcttgagatcctttttttctgcgcgtaatctgctgcttgcaaacaaaaaaaccaccgctaccagcggtggtttgtttgccggatcaagagctaccaactctttttccgaaggtaactggcttcagcagagcgcagataccaaatactgttcttctagtgtagccgtagttagcccaccacttcaagaactctgtagcaccgcctacatacctcgctctgctaatcctgttaccagtggctgctgccagtggcgataagtcgtgtcttaccgggttggactcaagacgatagttaccggataaggcgcagcggtcgggctgaacggggggttcgtgcacacagcccagcttggagcgaacgacctacaccgaactgagatacctacagcgtgagctatgagaaagcgccacgcttcccgaagggagaaaggcggacaggtatccggtaagcggcagggtcggaacaggagagcgcacgagggagcttccagggggaaacgcctggtatctttatagtcctgtcgggtttcgccacctctgacttgagcgtcgatttttgtgatgctcgtcaggggggcggagcctatggaaaaacgccagcaacgcggcctttttacggttcctggccttttgctggccttttgctcacatgttctttcctgcgttatcccctgattctgtggataaccgtattaccgcctttgagtgagctgataccgctcaaggctgagcggccgcttaaccctttcactgccagccgatttgtcccaaagtggaacttgtattgccagacagtttttgaacgttttgcactgtttcactttaggggcctttcctcgaggggacttttagtttacccaggaaaacaatatattgtttttttcagaacaacctaagctttcaaaatatggtagaatttttgtgtaattccaattctgtaacaagatataggcttctaaatgtctaaaaatgcaaacctaggtggagtgtggaactgaacctccgtgggagtcttgagtgtgccaggccctctctccgtgaaggaggcaatgcctgtgggcgtcgccgttgccgggacggtctggcacacgcaggcgtgtggctctcgttcatttccacgtagaagtccagagcgacaccccagagaggagatgcctccccggcgtgatggcctgacgatggattcccgcgtgcggcaacgtggggagtctgcagtgtggccggtttggaacctggcaaggagagcgaaggcaccgtgccgggcttgcacccttccctgcatgtttccgggtgcccgcagagctccgggagcaaacagtcggcatggccagcctttcgggggccggagagacttgagcaacaggccgccttgcggagggcaaagccacgcggaaaccaaaatcacgcctccgtcgtcctgcgtgtggctcctccgtggccggggctgtcggcctcgcgccgcgttgcagggctcagcctggggatgtgcggtctgtgaaccgcgcgggtgaacacccgacggcaacccgagtcccggtcttttgtcccggaggaaaccgcccactccctgggccacggaaccggggcgaatgggtggtgccccgccggccggcgcggcggctgtgggcccagccctcagcccgcgccggacgctgaccgttttcccggagggcgggggtcccgctactcccggaggccgaggaccgcttttcctccctgccttcctccccccgttccccggctccctcccgcccgcccccagtccctgcgtcgctctgtctttccctccgttcctccctgcctccctgcctccctccctccctcctaacgtccctccgcccgtccttccgcccctctaggactcccgttcctctctccatctctgcccgccttccctcccgcctggaacgctcagcgtccccggtgtgcgccgggcctggggtctgcgttccgccgccaggcgctccgtgctggcacctgggcggctgcaggggcccgggcgggcgggcgacggtggcgcgggggcgcataggaggcgagccgccggagcggtgtcaggcccggacgctgcgcggggcccggtgtttcgcgggacgggggtcaccacccagcccaggggacgacgcgttttccgggggtggggggtggggggtggggagggggcggtcaggcggcggggtgggctggtggagaggcaggagagctctgcccgggctgctcccacagcccaggcggctgcccgcaaacccgcgcgtgcgcagtaggcggcccacctggtgttcagcgaagggcgacacaaaattttctgatctccataagagaagagggacagctatgactgggagtagtcaggagaggaggaaaaatctggctagtaaaacatgtaaggaaaattttagggatgttaaagaaaaaaataacacaaaacaaaatataaaaaaaatctaacctcaagtcaaggcttttctatggaataaggaatggacagcagggggctgtttcatatactgatgacctctttatagccaacctttgttcatggcagccagcatatgggcatatgttgccaaactctaaaccaaatactcattctgatgttttaaatgatttgccctcccatatgttcttccgagtgagagacacaaaaaattccaacacactattgcaatgaaaataaatttcctttattagccattaattaactctggagacg

SEQ ID NO: 221 - DNA, 5907 bp, Artificial Sequence
  Synthetic
agcttgcttgttctttttgcagaagctcagaataaacgctcaactttggccgccaccatgcccccgccccgcctgctgttcttcctcctcttcctgaccccaatggaagtccgccctgaggaaccgctcgtcgtgaaagtggaagaaggagacaacgccgtgcttcagtgcctcaagggcacctccgacgggccgacccagcaactcacttggagcagagagagcccgctcaagcccttcctgaaactgagcttggggcttccggggctgggtattcatatgcggcccctcgcaatctggttgtttatctttaacgtgtcacagcagatgggtggcttttacctgtgccagcccgggcctccttcggaaaaggcctggcagcctggatggactgtgaatgtcgaaggctcgggagagctgttcagatggaacgtgtccgacctgggaggcttgggctgcggtctgaagaacagatcctccgaggggccgagctccccctccggaaagctgatgtcacctaagctctacgtgtgggctaaggacaggcccgagatttgggaaggggagccgccttgtttgcctcctcgggactcactcaaccagtcgctgagccaggatctcactatggcccccgggtccacgctgtggctgtcctgcggagtccccccggactcagtgtcgagaggacccctgtcgtggacgcacgtgcatccgaagggccctaagagcctgctgagccttgagctgaaggacgaccgccccgcaagggatatgtgggtcatggaaaccggactgctcctgccgcgggcgaccgcccaagatgccggaaagtattactgccaccgcggcaacctgactatgagcttccacctggaaattaccgcgcggccagtgctgtggcactggctgctgcggactggcggatggaaagtgtccgccgtgaccctggcttacctgatcttctgcctgtgttccctcgtgggaattctccatctgcaacgcgctctcgtgctgcggcgcaagcgcaagcggatgaccgacccaactagaaggttcttcaaggtcaccccgccgcccggctcggggccacagaatcagtacggcaacgtgctgtcactgccgacccccacttccggcctgggacgggcacaacgctgggccgcgggcctcggtggcaccgccccgtcctacggcaacccgtcctccgacgtgcaagccgatggtgccctggggtcccgctcccctccgggagtgggacccgaagaagaagagggagagggttacgaagaacccgactcagaagaggactccgaattctacgaaaacgatagcaacctgggacaggatcagctgtcccaagacggatcgggctacgagaaccccgaggacgaacccctgggaccagaggatgaggactccttctccaatgctgagtcgtacgagaacgaggacgaagaactgacacagccagtggccaggaccatggacttcctttcccctcacggttcggcgtgggacccgtcccgcgaggccacctccctgggaagccagtcatacgaagatatgcggggcatcctctacgcggcgccgcagcttagatcgatccgaggacagcctggacccaaccacgaagaggacgccgactcctatgaaaacatggacaaccctgatggacctgaccctgcctgggggggtggcggccggatgggcacctggtctacccggtaatgaggttaattgccagccatctgttgtttgcccctcccccgtgccttccttgaccctggaaggtgccactcccactgtcctttcctaataaaatgaggaaattgcatcgcattgtctgagtaggtgtcattctattctggggggtggggtggggcaggacagcaagggggaggattgggaatacaatagcaggcatgctggggatgcggtgggctctatgggtacccaggtgctgaagaattgacccggttcctcctgggttataatggttacaaataaagcaatagcatcacaaatttcacaaataaagcatttttttcactgcattctagttgtggtttgtccaaactcatcaatgtatcttatcatgtctggaagacaccacaggtaccaatattctcactgactccgtcctggagttggatgagagataatggccttacgttgtgccaggggagggtcgggctggatttagcaagatttaccttctccaaagagcggtgctgcagtggcacagctgcccacggaggtgggggggtcaccgtccctggaggtgatgaagaactgtggggatgtggcactgagggacatggccagtgggcacggtgggtgggttggggttggtcttggggatcttggagggcttttccagccttcatgatttgacgattgtatgaacatctacatggcaattctccagctgcctgtcccagtcctactgacccagctgtatctctccaggcaagcacttccaccccttctgcttgcatccagacaccatcaaacatgcaggctcagacacagggaccagcagtgtctgtggcctttttgtgctcctctccatgctgggttttaacttgctctttgtccttctatcctatcttcttatccttaaggctgttctgaacgctgtgacttggagagtgtcccagagccctcaacaccagcatgtcccacgtccatgctgtcctgcacttccttatccccaagatctgcctctccgtgatgcactgaattggcaaacatgtgtcaccccagaccaacaatgtcacagcaaactcccccttgataggacaagggggaatggctttacactgagacaggggaggtttgggttggatatgaggaggcagtttttcccccagagggtggtgacgcactgaacaggttgcccaaggaggctgtggatgccccatccctgcaggcattcaaggccaggctggatgtggctctgggcagcctgggctgctggttgatgaccctgcacatagcagggggttggatctggatgagcactgtgctcctttgcaacccaggccgttctatgattctgtcattctaaatctctctttcagcctaaagctttttccccgtatccccccaggtgtctgcaggctcaaagagcagcgagaagcgttcagaggaaagcgatcccgtgccaccttccccgtgcccgggctgtccccgcacgctgccggctcggggatgcggggggagcgccggaccggagcggagccccgggcggctcgctgctgccccctagcgggggagggacgtaattacatccctgggggctttgggggggggctgtccccgtgagctcgcgctagcgacagcccccccggctcgttgcccagaggggctgtcatcgctagaaactctctgcagcggcggcacatgctgccgctgcagagagaagaattaaaatgccaacaacgtatgggacgcgtcgttggcatttaagcccttttactgccacgacgtatcccatgcgtgattggcaggcaaagggttaaggcgcgccgatgcaatttcctcattttattaggaaaggacagtgggagtggcaccttccagggtcaaggaaggcacgggggaggggcaaacaacagatggctggcaagagagcaggtttactgataggtatcgagatcgacggccttgaccacttccaccaggcacatgtgatctctcctctcatcgcggtctttggagagcttagtgtgataagtgatatgatggtagcgcggaatgtggacagccgctgaaccggccagtggccgattcatctggctacacttggtcaccagcttctccgtcaccccctcgatgtcgtaggcttgattgaactccacgcggattccgttgttcacagtgtcggggagaatgtaaaggatgctgggagggcactggaaggcgacattcttccgaagaatatgcccgtccttcttaaagttttctccagtcagagtcacccggttgtagatagatcccctctcataggtgaccatcgcgcgggtcttgtacactccatctccctcaaaagaaatggtgcgctcttgggtataaccttccggcatggcggatttgaagaagtccttaatgtggctagggtacttagcaaaacactgcactccatacgagagggttgacacaagggtggcccaaggcactggcagatctccagtggtacagatatacttggccttaatggttccagtcgtagcgtccccggttccttctcccttgatgatgaacttcattccttcgacgtccccttccagctcggtgatgtacggaatctccttctcaaacagcttagcaccttcggtcagggcagtcatggtggcggcgtcactcttggcacggggaatccgcgttccaatgcaccgttcccggccgcggaggctggatcggtcccggtgtcttctatggaggtcaaaacagcgtggatgggctctccaggcgatctgacggttcactaaacgagctctgcttatatagacctcccaccgtacacgcctaccgcccatttgcgtcaatggggcggagttgttacgacattttggaaagtcccgttgattttggtgccaaaacaaactcccattgacgtcaatggggtggagacttggaaatccccgtgagtcaaaccgctatccacgcccattgatgtactgccaaaaccgcatcaccatggtaatagcgatgactaatacgtagatgtactgccaagtaggaaagtcccgtaaggtcatgtactgggcataatgccaggcgggccatttaccgtcattgacgtcaatagggggcggacttggcatatgatacacttgatgtactgccaagtgggcagtttaccgtaaatactccacccattgacgtcaatggaaagtccctattggcgttactatgggaacatacgtcattattgacgtcaatgggcgggggtcgttgggcggtcagccaggcgggccatttaccgtaagtcgtctacagagccccgtacgccagagcccccgcagtgtcgacaattaatcatcggcatagtatatcggcatagtataatacgacaaggtgaggaagtaaaaaatgagccatatccaacgggaaacgtcgaggccgcgattaaattccaacatggatgctgatttatatgggtataaatgggctcgcgataatgtcgggcaatcaggtgcgacaatctatcgcttgtatgggaagcccgatgcgccagagttgtttctgaaacatggcaaaggtagcgttgccaatgatgttacagatgagatggtcagactaaactggctgacggaatttatgccacttccgaccatcaagcattttatccgtactcctgatgatgcatggttactcaccactgcgatccccggaaaaacagcgttccaggtattagaagaatatcctgattcaggtgaaaatattgttgatgcgctggcagtgttcctgcgccggttgcactcgattcctgtttgtaattgtccttttaacagcgatcgcgtatttcgcctcgctcaggcgcaatcacgaatgaataacggtttggttgatgcgagtgattttgatgacgagcgtaatggctggcctgttgaacaagtctggaaagaaatgcataaacttttgccattctcaccggattcagtcgtcactcatggtgatttctcacttgataaccttatttttgacgaggggaaattaataggttgtattgatgttggacgagtcggaatcgcagaccgataccaggatcttgccatcctatggaactgcctcggtgagttttctccttcattacagaaacggctttttcaaaaatatggtattgataatcctgatatgaataaattgcagtttcatttgatgctcgatgagtttttctaa

SEQ ID NO: 222 - DNA, 1845 bp, Artificial Sequence
  Synthetic
cgaagaacaacgagaagatcctcaacttctcctaagccttttcactaatagggagaagttcgatggggcagccttgggcagacccacacttctgctccatttccctggttcctgcagctctcagattctcccattttattcgggaagcagctttctggtttctgggtcctggatgtccttggtgcacactccaaggactcctcgtccttaatccatagtctgtattccctgagtcctatcctgggaaccctcatccggtcacttcctcggcgggacaatctcagctcccctccccctctcaggtcggagcccacacgcttggtgcgtgcacatttcaaaaacgaggcgggtccaaaaagagggagggggggaatgagagaggcccagctactcgcggctttacgggtgcacgtagctcaggcctctgcgcccttgagctgggactggatgagccgagcgggaggcggggcgcgcgtcatcagctccccccaccatccagttcctataaatacggactgcagccctccctggtgctctctgctcctccctgttctagagacagccgcatcttcttgtgcagtgccaggtgaaaaagaaaagaaaaaaaaggactgggccgcaggaggccggagaggaatggaaattaggaatggggggaaggacgctgtacgggtttaggggcgctggtgcgaggtccggaagccgagcccaggctccgcattgcagaggatggtagaggacgtgatggggcatgcggcgggaatggaggcgggtggggggaggggactggccacgctaatctgactttcttctcccgcagcctcttctcatagacaagagcttgcttgttctttttgcagaagggccgccaccatgactgccctgaccgaaggtgctaagctgtttgagaaggagattccgtacatcaccgagctggaaggggacgtcgaaggaatgaagttcatcatcaagggagaaggaaccggggacgctacgactggaaccattaaggccaagtatatctgtaccactggagatctgccagtgccttgggccacccttgtgtcaaccctctcgtatggagtgcagtgttttgctaagtaccctagccacattaaggacttcttcaaatccgccatgccggaaggttatacccaagagcgcaccatttcttttgagggagatggagtgtacaagacccgcgcgatggtcacctatgagaggggatctatctacaaccgggtgactctgactggagaaaactttaagaaggacgggcatattcttcggaagaatgtcgccttccagtgccctcccagcatcctttacattctccccgacactgtgaacaacggaatccgcgtggagttcaatcaagcctacgacatcgagggggtgacggagaagctggtgaccaagtgtagccagatgaatcggccactggccggttcagcggctgtccacattccgcgctaccatcatatcacttatcacactaagctctccaaagaccgcgatgagaggagagatcacatgtgcctggtggaagtggtcaaggccgtcgatctcgatacctatcagtaaacctgctctcttgccagccatctgttgtttgcccctcccccgtgccttccttgaccctggaaggtgccactcccactgtcctttcctaataaaatgaggaaattgcatcgcattgtctgagtaggtgtcattctattctggggggtggggtggggcaggacagcaagggggaggattgggaatacaatagcaggcatgctggggatgcggtgggctctatgggtacccaggtgctgaagaattgacccggttcctcctggg

SEQ ID NO: 223 - DNA, 10148 bp, Artificial Sequence
  Synthetic
cctctcccggccagaggagcaaggtatgcgggaggcgaccaggaggatagcggggctgacgtcgggaggtggcctccgtgggaaggacacccggatcttgacacagccttggcagcggagtcaggaagagtaggggtaggttctggacgccctcttggccagctcatcgccgccccaccctctgctggagcacagagtaattcatacaaaaggagggatcgccttcgcaaggggagagcccagggaccgtccctaaattctcacagacccaaatccctgtagccgccccacgacagcgcgaggagcatgcgcccagggctgagcgcgggtagatcagagcacacaagctcacagtccccggcggtggggggaggggcgcgctgagcgggggccagggagctggcgcggggcaaactgggaaagtggtgtcgtgtgctggctccgccctcttcccgagggtgggggagaacggtatataagtgcggtagtcgccttggacgttctttttcgcaacgggtttgccgtcagaacgcaggtgagtggcgggtgtggcttccgcgggccccggagctggagccctgctctgagcgggccgggctgatatgcgagtgtcgtccgcagggtttagctgtgagcattcccacttcgagtggcgggcggtgcgggggtgagagtgcgaggcctagcggcaaccccgtagcctcgcctcgtgtccggcttgaggcctagcgtggtgtccgccgccgcgtgccactccggccgcactatgcgttttttgtccttgctgccctcgattgccttccagcagcatgggctaacaaagggagggtgtggggctcactcttaaggagcccatgaagcttacgttggataggaatggaagggcaggaggggcgactggggcccgcccgccttcggagcacatgtccgacgccacctggatggggcgaggcctgtggctttccgaagcaatcgggcgtgagtttagcctacctgggccatgtggccctagcactgggcacggtctggcctggcggtgccgcgttcccttgcctcccaacaagggtgaggccgtcccgcccggcaccagttgcttgcgcggaaagatggccgctcccggggccctgttgcaaggagctcaaaatggaggacgcggcagcccggtggagcgggcgggtgagtcacccacacaaaggaagagggccttgcccctcgccggccgctgcttcctgtgaccccgtggtctatcggccgcatagtcacctcgggcttctcttgagcaccgctcgtcgcggcggggggaggggatctaatggcgttggagtttgttcacatttggtgggtggagactagtcaggccagcctggcgctggaagtcattcttggaatttgcccctttgagtttggagcgaggctaattctcaagcctcttagcggttcaaaggtattttctaaacccgtttccaggtgttgtgaaagccaccgctaattcaaagcaagccgccaccatgcccccgccccgcctgctgttcttcctcctcttcctgaccccaatggaagtccgccctgaggaaccgctcgtcgtgaaagtggaagaaggagacaacgccgtgcttcagtgcctcaagggcacctccgacgggccgacccagcaactcacttggagcagagagagcccgctcaagcccttcctgaaactgagcttggggcttccggggctgggtattcatatgcggcccctcgcaatctggttgtttatctttaacgtgtcacagcagatgggtggcttttacctgtgccagcccgggcctccttcggaaaaggcctggcagcctggatggactgtgaatgtcgaaggctcgggagagctgttcagatggaacgtgtccgacctgggaggcttgggctgcggtctgaagaacagatcctccgaggggccgagctccccctccggaaagctgatgtcacctaagctctacgtgtgggctaaggacaggcccgagatttgggaaggggagccgccttgtttgcctcctcgggactcactcaaccagtcgctgagccaggatctcactatggcccccgggtccacgctgtggctgtcctgcggagtccccccggactcagtgtcgagaggacccctgtcgtggacgcacgtgcatccgaagggccctaagagcctgctgagccttgagctgaaggacgaccgccccgcaagggatatgtgggtcatggaaaccggactgctcctgccgcgggcgaccgcccaagatgccggaaagtattactgccaccgcggcaacctgactatgagcttccacctggaaattaccgcgcggccagtgctgtggcactggctgctgcggactggcggatggaaagtgtccgccgtgaccctggcttacctgatcttctgcctgtgttccctcgtgggaattctccatctgcaacgcgctctcgtgctgcggcgcaagcgcaagcggatgaccgacccaactagaaggttcttcaaggtcaccccgccgcccggctcggggccacagaatcagtacggcaacgtgctgtcactgccgacccccacttccggcctgggacgggcacaacgctgggccgcgggcctcggtggcaccgccccgtcctacggcaacccgtcctccgacgtgcaagccgatggtgccctggggtcccgctcccctccgggagtgggacccgaagaagaagagggagagggttacgaagaacccgactcagaagaggactccgaattctacgaaaacgatagcaacctgggacaggatcagctgtcccaagacggatcgggctacgagaaccccgaggacgaacccctgggaccagaggatgaggactccttctccaatgctgagtcgtacgagaacgaggacgaagaactgacacagccagtggccaggaccatggacttcctttcccctcacggttcggcgtgggacccgtcccgcgaggccacctccctgggaagccagtcatacgaagatatgcggggcatcctctacgcggcgccgcagcttagatcgatccgaggacagcctggacccaaccacgaagaggacgccgactcctatgaaaacatggacaaccctgatggacctgaccctgcctgggggggtggcggccggatgggcacctggtctacccggtaatgaggttaattgccagccatctgttgtttgcccctcccccgtgccttccttgaccctggaaggtgccactcccactgtcctttcctaataaaatgaggaaattgcatcgcattgtctgagtaggtgtcattctattctggggggtggggtggggcaggacagcaagggggaggattgggaatacaatagcaggcatgctggggatgcggtgggctctatgggtacccaggtgctgaagaattgacccggttcctcctgggttataatggttacaaataaagcaatagcatcacaaatttcacaaataaagcatttttttcactgcattctagttgtggtttgtccaaactcatcaatgtatcttatcatgtctggaagacaccacaggtaccaatattctcactgactccgtcctggagttggatgagagataatggccttacgttgtgccaggggagggtcgggctggatttagcaagatttaccttctccaaagagcggtgctgcagtggcacagctgcccacggaggtgggggggtcaccgtccctggaggtgatgaagaactgtggggatgtggcactgagggacatggccagtgggcacggtgggtgggttggggttggtcttggggatcttggagggcttttccagccttcatgatttgacgattgtatgaacatctacatggcaattctccagctgcctgtcccagtcctactgacccagctgtatctctccaggcaagcacttccaccccttctgcttgcatccagacaccatcaaacatgcaggctcagacacagggaccagcagtgtctgtggcctttttgtgctcctctccatgctgggttttaacttgctctttgtccttctatcctatcttcttatccttaaggctgttctgaacgctgtgacttggagagtgtcccagagccctcaacaccagcatgtcccacgtccatgctgtcctgcacttccttatccccaagatctgcctctccgtgatgcactgaattggcaaacatgtgtcaccccagaccaacaatgtcacagcaaactcccccttgataggacaagggggaatggctttacactgagacaggggaggtttgggttggatatgaggaggcagtttttcccccagagggtggtgacgcactgaacaggttgcccaaggaggctgtggatgccccatccctgcaggcattcaaggccaggctggatgtggctctgggcagcctgggctgctggttgatgaccctgcacatagcagggggttggatctggatgagcactgtgctcctttgcaacccaggccgttctatgattctgtcattctaaatctctctttcagcctaaagctttttccccgtatccccccaggtgtctgcaggctcaaagagcagcgagaagcgttcagaggaaagcgatcccgtgccaccttccccgtgcccgggctgtccccgcacgctgccggctcggggatgcggggggagcgccggaccggagcggagccccgggcggctcgctgctgccccctagcgggggagggacgtaattacatccctgggggctttgggggggggctgtccccgtgagctcgcgctagcgacagcccccccggctcgttgcccagaggggctgtcatcgctagaaactctctgcagcggcggcacatgctgccgctgcagagagaagaattaaaatgccaacaacgtatgggacgcgtcgttggcatttaagcccttttactgccacgacgtatcccatgcgtgattggcaggcaaagggttaaggcgcgccgatgcaatttcctcattttattaggaaaggacagtgggagtggcaccttccagggtcaaggaaggcacgggggaggggcaaacaacagatggctggcaagagagcaggtttactgataggtatcgagatcgacggccttgaccacttccaccaggcacatgtgatctctcctctcatcgcggtctttggagagcttagtgtgataagtgatatgatggtagcgcggaatgtggacagccgctgaaccggccagtggccgattcatctggctacacttggtcaccagcttctccgtcaccccctcgatgtcgtaggcttgattgaactccacgcggattccgttgttcacagtgtcggggagaatgtaaaggatgctgggagggcactggaaggcgacattcttccgaagaatatgcccgtccttcttaaagttttctccagtcagagtcacccggttgtagatagatcccctctcataggtgaccatcgcgcgggtcttgtacactccatctccctcaaaagaaatggtgcgctcttgggtataaccttccggcatggcggatttgaagaagtccttaatgtggctagggtacttagcaaaacactgcactccatacgagagggttgacacaagggtggcccaaggcactggcagatctccagtggtacagatatacttggccttaatggttccagtcgtagcgtccccggttccttctcccttgatgatgaacttcattccttcgacgtccccttccagctcggtgatgtacggaatctccttctcaaacagcttagcaccttcggtcagggcagtcatggtggcggcgtcactcttggcacggggaatccgcgttccaatgcaccgttcccggccgcggaggctggatcggtcccggtgtcttctatggaggtcaaaacagcgtggatgggctctccaggcgatctgacggttcactaaacgagctctgcttatatagacctcccaccgtacacgcctaccgcccatttgcgtcaatggggcggagttgttacgacattttggaaagtcccgttgattttggtgccaaaacaaactcccattgacgtcaatggggtggagacttggaaatccccgtgagtcaaaccgctatccacgcccattgatgtactgccaaaaccgcatcaccatggtaatagcgatgactaatacgtagatgtactgccaagtaggaaagtcccgtaaggtcatgtactgggcataatgccaggcgggccatttaccgtcattgacgtcaatagggggcggacttggcatatgatacacttgatgtactgccaagtgggcagtttaccgtaaatactccacccattgacgtcaatggaaagtccctattggcgttactatgggaacatacgtcattattgacgtcaatgggcgggggtcgttgggcggtcagccaggcgggccatttaccgtaagtcgtctacagagccccgtacgccagagcccccgcagtgtcgacaattaatcatcggcatagtatatcggcatagtataatacgacaaggtgaggaagtaaaaaatgagccatatccaacgggaaacgtcgaggccgcgattaaattccaacatggatgctgatttatatgggtataaatgggctcgcgataatgtcgggcaatcaggtgcgacaatctatcgcttgtatgggaagcccgatgcgccagagttgtttctgaaacatggcaaaggtagcgttgccaatgatgttacagatgagatggtcagactaaactggctgacggaatttatgccacttccgaccatcaagcattttatccgtactcctgatgatgcatggttactcaccactgcgatccccggaaaaacagcgttccaggtattagaagaatatcctgattcaggtgaaaatattgttgatgcgctggcagtgttcctgcgccggttgcactcgattcctgtttgtaattgtccttttaacagcgatcgcgtatttcgcctcgctcaggcgcaatcacgaatgaataacggtttggttgatgcgagtgattttgatgacgagcgtaatggctggcctgttgaacaagtctggaaagaaatgcataaacttttgccattctcaccggattcagtcgtcactcatggtgatttctcacttgataaccttatttttgacgaggggaaattaataggttgtattgatgttggacgagtcggaatcgcagaccgataccaggatcttgccatcctatggaactgcctcggtgagttttctccttcattacagaaacggctttttcaaaaatatggtattgataatcctgatatgaataaattgcagtttcatttgatgctcgatgagtttttctaactcatgaccaaaatcccttaacgtgagttacgcgcgcgtcgttccactgagcgtcagaccccgtagaaaagatcaaaggatcttcttgagatcctttttttctgcgcgtaatctgctgcttgcaaacaaaaaaaccaccgctaccagcggtggtttgtttgccggatcaagagctaccaactctttttccgaaggtaactggcttcagcagagcgcagataccaaatactgttcttctagtgtagccgtagttagcccaccacttcaagaactctgtagcaccgcctacatacctcgctctgctaatcctgttaccagtggctgctgccagtggcgataagtcgtgtcttaccgggttggactcaagacgatagttaccggataaggcgcagcggtcgggctgaacggggggttcgtgcacacagcccagcttggagcgaacgacctacaccgaactgagatacctacagcgtgagctatgagaaagcgccacgcttcccgaagggagaaaggcggacaggtatccggtaagcggcagggtcggaacaggagagcgcacgagggagcttccagggggaaacgcctggtatctttatagtcctgtcgggtttcgccacctctgacttgagcgtcgatttttgtgatgctcgtcaggggggcggagcctatggaaaaacgccagcaacgcggcctttttacggttcctggccttttgctggccttttgctcacatgttctttcctgcgttatcccctgattctgtggataaccgtattaccgcctttgagtgagctgataccgctcaaggctgagcggccgcttaaccctttcactgccagccgatttgtcccaaagtggaacttgtattgccagacagtttttgaacgttttgcactgtttcactttaggggcctttcctcgaggggacttttagtttacccaggaaaacaatatattgtttttttcagaacaacctaagctttcaaaatatggtagaatttttgtgtaattccaattctgtaacaagatataggcttctaaatgtctaaaaatgcaaacctaggtggagtgtggaactgaacctccgtgggagtcttgagtgtgccaggccctctctccgtgaaggaggcaatgcctgtgggcgtcgccgttgccgggacggtctggcacacgcaggcgtgtggctctcgttcatttccacgtagaagtccagagcgacaccccagagaggagatgcctccccggcgtgatggcctgacgatggattcccgcgtgcggcaacgtggggagtctgcagtgtggccggtttggaacctggcaaggagagcgaaggcaccgtgccgggcttgcacccttccctgcatgtttccgggtgcccgcagagctccgggagcaaacagtcggcatggccagcctttcgggggccggagagacttgagcaacaggccgccttgcggagggcaaagccacgcggaaaccaaaatcacgcctccgtcgtcctgcgtgtggctcctccgtggccggggctgtcggcctcgcgccgcgttgcagggctcagcctggggatgtgcggtctgtgaaccgcgcgggtgaacacccgacggcaacccgagtcccggtcttttgtcccggaggaaaccgcccactccctgggccacggaaccggggcgaatgggtggtgccccgccggccggcgcggcggctgtgggcccagccctcagcccgcgccggacgctgaccgttttcccggagggcgggggtcccgctactcccggaggccgaggaccgcttttcctccctgccttcctccccccgttccccggctccctcccgcccgcccccagtccctgcgtcgctctgtctttccctccgttcctccctgcctccctgcctccctccctccctcctaacgtccctccgcccgtccttccgcccctctaggactcccgttcctctctccatctctgcccgccttccctcccgcctggaacgctcagcgtccccggtgtgcgccgggcctggggtctgcgttccgccgccaggcgctccgtgctggcacctgggcggctgcaggggcccgggcgggcgggcgacggtggcgcgggggcgcataggaggcgagccgccggagcggtgtcaggcccggacgctgcgcggggcccggtgtttcgcgggacgggggtcaccacccagcccaggggacgacgcgttttccgggggtggggggtggggggtggggagggggcggtcaggcggcggggtgggctggtggagaggcaggagagctctgcccgggctgctcccacagcccaggcggctgcccgcaaacccgcgcgtgcgcagtaggcggcccacctggtgttcagcgaagggcgacacaaaattttctgatctccataagagaagagggacagctatgactgggagtagtcaggagaggaggaaaaatctggctagtaaaacatgtaaggaaaattttagggatgttaaagaaaaaaataacacaaaacaaaatataaaaaaaatctaacctcaagtcaaggcttttctatggaataaggaatggacagcagggggctgtttcatatactgatgacctctttatagccaacctttgttcatggcagccagcatatgggcatatgttgccaaactctaaaccaaatactcattctgatgttttaaatgatttgccctcccatatgttcttccgagtgagagacacaaaaaattccaacacactattgcaatgaaaataaatttcctttattagccattaattaagctttt

SEQ ID NO: 224 - DNA, 11424 bp, Artificial Sequence
  Synthetic
agagtagtcttccctctcccggccagaggagcaaggtatgcgggaggcgaccaggaggatagcggggctgacgtcgggaggtggcctccgtgggaaggacacccggatcttgacacagccttggcagcggagtcaggaagagtaggggtaggttctggacgccctcttggccagctcatcgccgccccaccctctgctggagcacagagtaattcatacaaaaggagggatcgccttcgcaaggggagagcccagggaccgtccctaaattctcacagacccaaatccctgtagccgccccacgacagcgcgaggagcatgcgcccagggctgagcgcgggtagatcagagcacacaagctcacagtccccggcggtggggggaggggcgcgctgagcgggggccagggagctggcgcggggcaaactgggaaagtggtgtcgtgtgctggctccgccctcttcccgagggtgggggagaacggtatataagtgcggtagtcgccttggacgttctttttcgcaacgggtttgccgtcagaacgcaggtgagtggcgggtgtggcttccgcgggccccggagctggagccctgctctgagcgggccgggctgatatgcgagtgtcgtccgcagggtttagctgtgagcattcccacttcgagtggcgggcggtgcgggggtgagagtgcgaggcctagcggcaaccccgtagcctcgcctcgtgtccggcttgaggcctagcgtggtgtccgccgccgcgtgccactccggccgcactatgcgttttttgtccttgctgccctcgattgccttccagcagcatgggctaacaaagggagggtgtggggctcactcttaaggagcccatgaagcttacgttggataggaatggaagggcaggaggggcgactggggcccgcccgccttcggagcacatgtccgacgccacctggatggggcgaggcctgtggctttccgaagcaatcgggcgtgagtttagcctacctgggccatgtggccctagcactgggcacggtctggcctggcggtgccgcgttcccttgcctcccaacaagggtgaggccgtcccgcccggcaccagttgcttgcgcggaaagatggccgctcccggggccctgttgcaaggagctcaaaatggaggacgcggcagcccggtggagcgggcgggtgagtcacccacacaaaggaagagggccttgcccctcgccggccgctgcttcctgtgaccccgtggtctatcggccgcatagtcacctcgggcttctcttgagcaccgctcgtcgcggcggggggaggggatctaatggcgttggagtttgttcacatttggtgggtggagactagtcaggccagcctggcgctggaagtcattcttggaatttgcccctttgagtttggagcgaggctaattctcaagcctcttagcggttcaaaggtattttctaaacccgtttccaggtgttgtgaaagccaccgctaattcaaagcaagccgccaccatgcccccgccccgcctgctgttcttcctcctcttcctgaccccaatggaagtccgccctgaggaaccgctcgtcgtgaaagtggaagaaggagacaacgccgtgcttcagtgcctcaagggcacctccgacgggccgacccagcaactcacttggagcagagagagcccgctcaagcccttcctgaaactgagcttggggcttccggggctgggtattcatatgcggcccctcgcaatctggttgtttatctttaacgtgtcacagcagatgggtggcttttacctgtgccagcccgggcctccttcggaaaaggcctggcagcctggatggactgtgaatgtcgaaggctcgggagagctgttcagatggaacgtgtccgacctgggaggcttgggctgcggtctgaagaacagatcctccgaggggccgagctccccctccggaaagctgatgtcacctaagctctacgtgtgggctaaggacaggcccgagatttgggaaggggagccgccttgtttgcctcctcgggactcactcaaccagtcgctgagccaggatctcactatggcccccgggtccacgctgtggctgtcctgcggagtccccccggactcagtgtcgagaggacccctgtcgtggacgcacgtgcatccgaagggccctaagagcctgctgagccttgagctgaaggacgaccgccccgcaagggatatgtgggtcatggaaaccggactgctcctgccgcgggcgaccgcccaagatgccggaaagtattactgccaccgcggcaacctgactatgagcttccacctggaaattaccgcgcggccagtgctgtggcactggctgctgcggactggcggatggaaagtgtccgccgtgaccctggcttacctgatcttctgcctgtgttccctcgtgggaattctccatctgcaacgcgctctcgtgctgcggcgcaagcgcaagcggatgaccgacccaactagaaggttcttcaaggtcaccccgccgcccggctcggggccacagaatcagtacggcaacgtgctgtcactgccgacccccacttccggcctgggacgggcacaacgctgggccgcgggcctcggtggcaccgccccgtcctacggcaacccgtcctccgacgtgcaagccgatggtgccctggggtcccgctcccctccgggagtgggacccgaagaagaagagggagagggttacgaagaacccgactcagaagaggactccgaattctacgaaaacgatagcaacctgggacaggatcagctgtcccaagacggatcgggctacgagaaccccgaggacgaacccctgggaccagaggatgaggactccttctccaatgctgagtcgtacgagaacgaggacgaagaactgacacagccagtggccaggaccatggacttcctttcccctcacggttcggcgtgggacccgtcccgcgaggccacctccctgggaagccagtcatacgaagatatgcggggcatcctctacgcggcgccgcagcttagatcgatccgaggacagcctggacccaaccacgaagaggacgccgactcctatgaaaacatggacaaccctgatggacctgaccctgcctgggggggtggcggccggatgggcacctggtctacccggtaatgaggttaattgccagccatctgttgtttgcccctcccccgtgccttccttgaccctggaaggtgccactcccactgtcctttcctaataaaatgaggaaattgcatcgcattgtctgagtaggtgtcattctattctggggggtggggtggggcaggacagcaagggggaggattgggaatacaatagcaggcatgctggggatgcggtgggctctatgggtacccaggtgctgaagaattgacccggttcctcctggggaagacaccacaaggtaccaatattctcactgactccgtcctggagttggatgagagataatggccttacgttgtgccaggggagggtcgggctggatttagcaagatttaccttctccaaagagcggtgctgcagtggcacagctgcccacggaggtgggggggtcaccgtccctggaggtgatgaagaactgtggggatgtggcactgagggacatggccagtgggcacggtgggtgggttggggttggtcttggggatcttggagggcttttccagccttcatgatttgacgattgtatgaacatctacatggcaattctccagctgcctgtcccagtcctactgacccagctgtatctctccaggcaagcacttccaccccttctgcttgcatccagacaccatcaaacatgcaggctcagacacagggaccagcagtgtctgtggcctttttgtgctcctctccatgctgggttttaacttgctctttgtccttctatcctatcttcttatccttaaggctgttctgaacgctgtgacttggagagtgtcccagagccctcaacaccagcatgtcccacgtccatgctgtcctgcacttccttatccccaagatctgcctctccgtgatgcactgaattggcaaacatgtgtcaccccagaccaacaatgtcacagcaaactcccccttgataggacaagggggaatggctttacactgagacaggggaggtttgggttggatatgaggaggcagtttttcccccagagggtggtgacgcactgaacaggttgcccaaggaggctgtggatgccccatccctgcaggcattcaaggccaggctggatgtggctctgggcagcctgggctgctggttgatgaccctgcacatagcagggggttggatctggatgagcactgtgctcctttgcaacccaggccgttctatgattctgtcattctaaatctctctttcagcctaaagctttttccccgtatccccccaggtgtctgcaggctcaaagagcagcgagaagcgttcagaggaaagcgatcccgtgccaccttccccgtgcccgggctgtccccgcacgctgccggctcggggatgcggggggagcgccggaccggagcggagccccgggcggctcgctgctgccccctagcgggggagggacgtaattacatccctgggggctttgggggggggctgtccccgtgagctcgcgctaggtcatatttttagtttaaaaaaataattatatgttttataatgaaaagaatctcattatctttcagtattaggttgatttatattccaaagaataatatttttgttaaattgttgatttttgtaaacctctaaatgtttgttgctaaaattactgtgtttaagaaaaagattaataaataataataatttcataattaaaaacttctttcattgaatgccattaaataaaccattattttacaaaataagatcaacataattgagtaaataataataagaacaatattatagtacaacaaaatatgggtatgtcataccctgccacattcttgatgtaactttttttcacctcatgctcgccgggttaagtttaaacgatgcaatttcctcattttattaggaaaggacagtgggagtggcaccttccagggtcaaggaaggcacgggggaggggcaaacaacagatggctggcaattttctaattgagcttgtgaccaagcttcgacgggagatcgcaatatcgtgccacagcgtgttccctctgaacgacgaacatctcgttatcgctctcctccaggcgttccagtctatggtccaccgcgtggatacccggcatcttcaggtttttggccggcttcttcgaccggtacgtagtcacaaagctacacgacaaatgtcctcctccgaccagcttcagggccatgtcagaccggccttcgagtcctccgtccgctgggtagagcatttcggtattggcttcccaccccagagtctttttctgcatcacggggccattggatgggaagttcacacctctgatcttcacgttgtagacaaggcagccatcttccaggctagtgtcttgcatcacggtcaccacgcctccatcttcgtaggtcgtgacccgttcccaagtgaatccctcagggaaggattgcttgaagaagtccgggatccccttcgggtacttgataaaagtgcgcgatccgtacatgaaggaggtagccaggatgtcgaatgcaaaagggagtggtccgccttcgaccaccttaatgcgcatggtctgggtcccttcgtagggctttccctcgccctctgaggtgcatttgaagtggtgattgttgacagttccctccatgtacagtttcatatgcatgttctctttgatcaattcctccccttttgacaccatggtggcggcgtcactcttggcacggggaatccgcgttccaatgcaccgttcccggccgcggaggctggatcggtcccggtgtccactatggaggtcaaaacagcgtggatggcctctccaggcgatctgacggttcactaaacgagctctgcttatatagacctcccaccgtacacgcctaccgcccatttgcgtcaacggggcggggttattacgacattttggaaagtcccgttgattttggtgccaaaacaaactcccattgacgtcaatggggtggagacttggaaatccccgtgagtcaaaccgctatccacgcccattggtgtactgccaaaaccgcatcagcatggtaatagcgatgactaatacgtagatgtactgccaagtaggaaagtcccgtaaggtcatgtactgggcataatgccaggcgggccatttaccgtcattgacgtcaatagggggcggacttggcatatgatacacttgatgtactgccaagtgggcagtttaccgtaaatactccacccattgacgtcaatggaaagtccctattggcgttactatgggaacatacgtcattattgacgtcaatgggcgggggtcgttgggcggtcagccaggcgggccatttaccgtaagtgacgccgaggagtcgccgtttaaacttaatcagccttgagcggtatcagctcactcaaaggcggtaatacggttatccacagaatcaggggataacgcaggaaagaacatgtgagcaaaaggccagcaaaaggccaggaaccgtaaaaaggccgcgttgctggcgtttttccataggctccgcccccctgacgagcatcacaaaaatcgacgctcaagtcagaggtggcgaaacccgacaggactataaagataccaggcgtttccccctggaagctccctcgtgcgctctcctgttccgaccctgccgcttaccggatacctgtccgcctttctcccttcgggaagcgtggcgctttctcatagctcacgctgtaggtatctcagttcggtgtaggtcgttcgctccaagctgggctgtgtgcacgaaccccccgttcagcccgaccgctgcgccttatccggtaactatcgtcttgagtccaacccggtaagacacgacttatcgccactggcagcagccactggtaacaggattagcagagcgaggtatgtaggcggtgctacagagttcttgaagtggtgggctaactacggctacactagaagaacagtatttggtatctgcgctctgctgaagccagttaccttcggaaaaagagttggtagctcttgatccggcaaacaaaccaccgctggtagcggtggtttttttgtttgcaagcagcagattacgcgcagaaaaaaaggatctcaagaagatcctttgatcttttctacggggtctgacgctcagtggaacgacgcgcgcgtaactcacgttaagggattttggtcatgagttagaaaaactcatcgagcatcaaatgaaactgcaatttattcatatcaggattatcaataccatatttttgaaaaagccgtttctgtaatgaaggagaaaactcaccgaggcagttccataggatggcaagatcctggtatcggtctgcgattccgactcgtccaacatcaatacaacctattaatttcccctcgtcaaaaataaggttatcaagtgagaaatcaccatgagtgacgactgaatccggtgagaatggcaaaagtttatgcatttctttccagacttgttcaacaggccagccattacgctcgtcatcaaaatcactcgcatcaaccaaaccgttattcattcgtgattgcgcctgagcgaggcgaaatacgcgatcgctgttaaaaggacaattacaaacaggaatcgagtgcaaccggcgcaggaacactgccagcgcatcaacaatattttcacctgaatcaggatattcttctaatacctggaacgctgtttttccggggatcgcagtggtgagtaaccatgcatcatcaggagtacggataaaatgcttgatggtcggaagtggcataaattccgtcagccagtttagtctgaccatctcatctgtaacatcattggcaacgctacctttgccatgtttcagaaacaactctggcgcatcgggcttcccatacaagcgatagattgtcgcacctgattgcccgacattatcgcgagcccatttatacccatataaatcagcatccatgttggaatttaatcgcggcctcgacgtttcccgttggatatggctcattttttacttcctcaccttgtcgtattatactatgccgatatactatgccgatgattaattgtcgacactgcgggggctctttaattaacccggcgagcatgaggcagggtatctcataccctggtaaaattttaaagttgtgtattttataaaattttcgtctgacaacactagcgcgctcagtagctggaggcaggagcgtgcgggaggggatagtggcgtgatcgcagtgtggcacgggacaccggcgagatattcgtgtgcaaacctgtttcgggtatgttataccctgcctcattgttgacgtattttttttatgtaatttttccgattattaatttcaactgttttattggtatttttatgttatccattgttctttttttatgatttactgtatcggttgtctttcgttcctttagttgagtttttttttattattttcagtttttgatcaaagctaggaatattctcactgactccgtcctggagttggatgagagataatggccttacgttgtgccaggggagggtcgggctggatttagcaagatttaccttctccaaagagcggtgctgcagtggcacagctgcccacggaggtgggggggtcaccgtccctggaggtgatgaagaactgtggggatgtggcactgagggacatggccagtgggcacggtgggtgggttggggttggtcttggggatcttggagggcttttccagccttcatgatttgacgattgtatgaacatctacatggcaattctccagctgcctgtcccagtcctactgacccagctgtatctctccaggcaagcacttccaccccttctgcttgcatccagacaccatcaaacatgcaggctcagacacagggaccagcagtgtctgtggcctttttgtgctcctctccatgctgggttttaacttgctctttgtccttctatcctatcttcttatccttaaggctgttctgaacgctgtgacttggagagtgtcccagagccctcaacaccagcatgtcccacgtccatgctgtcctgcacttccttatccccaagatctgcctctccgtgatgcactgaattggcaaacatgtgtcaccccagaccaacaatgtcacagcaaactcccccttgataggacaagggggaatggctttacactgagacaggggaggtttgggttggatatgaggaggcagtttttcccccagagggtggtgacgcactgaacaggttgcccaaggaggctgtggatgccccatccctgcaggcattcaaggccaggctggatgtggctctgggcagcctgggctgctggttgatgaccctgcacatagcagggggttggatctggatgagcactgtgctcctttgcaacccaggccgttctatgattctgtcattctaaatctctctttcagcctaaagctttttccccgtatccccccaggtgtctgcaggctcaaagagcagcgagaagcgttcagaggaaagcgatcccgtgccaccttccccgtgcccgggctgtccccgcacgctgccggctcggggatgcggggggagcgccggaccggagcggagccccgggcggctcgctgctgccccctagcgggggagggacgtaattacatccctgggggctttgggggggggctgtccccgtgagctcgctctagagatctccataagagaagagggacagctatgactgggagtagtcaggagaggaggaaaaatctggctagtaaaacatgtaaggaaaattttagggatgttaaagaaaaaaataacacaaaacaaaatataaaaaaaatctaacctcaagtcaaggcttttctatggaataaggaatggacagcagggggctgtttcatatactgatgacctctttatagccaacctttgttcatggcagccagcatatgggcatatgttgccaaactctaaaccaaatactcattctgatgttttaaatgatttgccctcccatatgttcttccgagtgagagacacaaaaaattccaacacactattgcaatgaaaataaatttcctttattagccatttattcaaagaccaggaagggccggtgcaaggaggggaggagggcccgttgggaggcccagcgggcaggaggaacggctaccgaggctccagcttttggagacgctacttgaattgtttcaggaagcgcagatcgttttcgaaaaagctgcgcaaatcggtaacgccatagcgcagcatagtcaggcgctccatacccataccaaaaccaaagccgctgtagacctcagggtcaatgccgacattgcgcaggacattcgggtgaaccatgccgcaacccagaacttccagccacttaccattcttacccatgacatcaacttccgccgacggctccgtaaacggaaagtagctcggacggaagcgaatctgcagatcctcttcgaaaaagttacgcaggaaatcatgcagggtgcctttcagattggtaaaagagatgttcgtatcaacaatcaggccttccatttgatggaacatcggggtgtgggtctggtcgtaatcgttgcgatacacgcgaccaggcgcgataatacgaatcggcggctgctgggctttcatggtacggatctgaacaccggaagtttgggtacgcagcagacgggtcgtatcgaaccaaaaggtgtcatggtcggcacgtgctgggtggtgacccgggatgttcagagcgtcgaagttgtggtagtcatcctcgatctccggacccgtcgccacggtaaaacccagttcgccgaagaagctctcaatgcggtcgatggtacgcgtaaccggatgcaggccaccgttctcgatacgacgacccggcaggctcacgtcgatcgtttctgcggccaaacgcgcgttcagcgcagcgctctccagctcagccttacgggcattcagcgcctgttgcacttgctctttcgcttcattaatcaccgcaccggctgccggacgttcttctggcggcaactcacgcaaggtcgtcatttgcagggtcaggtggccctttttacccagatactccacacggacattatccagcgctgccacgtcgcttgcctggctaattgctgctttcgcgctcgctaccaattccgccaagtgggacatttttttacctcctatatacgagccggatgattaattgtcaacagctcatttcagaatgtgtcgcccttattcgactcttttcgtctct

SEQ ID NO: 225 - DNA, 9773 bp, Artificial Sequence
  Synthetic
atggcactccctgtcaccgccctcctcctcccactcgccctcttgctgcacgccgctcgcccggatattcagatgacgcagaccacctcaagtctgtcggcctcccttggtgatcgggtcaccatttcctgccgagccagccaggacatctccaagtacctgaactggtaccagcagaagcccgacgggaccgtgaagctgctgatctaccatacctcccggctgcatagcggggtgccgtcaaggtttagcggatcgggatccggcaccgactactcgctgactatctccaacttggaacaagaggacatcgccacctacttctgtcaacaagggaatactctgccctacactttcggcgggggaaccaagctcgagatcactggcggcggcggctcgggcggtggtggatccgggggcggtggctccgaggtcaagcttcaggaatccggacccggcctggtggcaccgtcacaatccctatccgtgacatgcaccgtcagcggagtgtcgctgcccgattacggagtgtcttggattaggcagcccccgcgcaaaggtcttgagtggctgggagtgatctggggatcagagactacctactacaacagcgccctcaagtcgaggctcaccatcatcaaggacaactccaagtcccaagtgtttctgaagatgaactccctgcaaactgacgacaccgccatctactactgcgcgaagcactactactacgggggaagctacgctatggactattggggacagggaacttccgtgactgtgtccagcaccacgacaccagccccgcgcccgccgacccccgccccgaccattgcgagccagccgctgagccttcggccggaagcctgcaggcccgcggccggcggagccgtgcacaccagaggactggacttcgcctgcgatatctatatctgggcgcctctggccggaacctgtggagtcctgctgctgtcactcgtgattactctgtactgcaagcgcggtcggaagaagctgctctacattttcaagcaacctttcatgcggccagtgcagaccactcaggaagaagatggctgttcctgccggttccctgaagaagaagagggcggctgcgaattgagagtgaagttctcccgctcggctgacgctcccgcctacaaacaggggcagaaccagctgtataacgaactgaacctcgggcgccgcgaggaatacgacgtgctggacaagcggagaggccgcgatcctgagatggggggaaagccccggagaaagaaccctcaggagggcctgtacaatgagctgcagaaagacaaaatggccgaggcgtacagcgagatcggcatgaagggcgaacgccggagaggaaagggacacgacggactgtaccagggactgtccaccgcgaccaaggatacctacgacgccctgcacatgcaggcactgccacctcggtgataaaagcttaattaatggctaataaaggaaatttattttcattgcaatagtgtgttggaattttttgtgtctctcactcggaagaacatatgggagggcaaatcatttaaaacatcagaatgagtatttggtttagagtttggcaacatatgcccatatgctggctgccatgaacaaaggttggctataaagaggtcatcagtatatgaaacagccccctgctgtccattccttattccatagaaaagccttgacttgaggttagattttttttatattttgttttgtgttatttttttctttaacatccctaaaattttccttacatgttttactagccagatttttcctcctctcctgactactcccagtcatagctgtccctcttctcttatggagatcagaaaattttgtgtcgcccttcgctgaacaccaggtgggccgcctactgcgcacgcgcgggtttgcgggcagccgcctgggctgtgggagcagcccgggcagagctctcctgcctctccaccagcccaccccgccgcctgaccgccccctccccaccccccaccccccacccccggaaaacgcgtcgtcccctgggctgggtggtgacccccgtcccgcgaaacaccgggccccgcgcagcgtccgggcctgacaccgctccggcggctcgcctcctatgcgcccccgcgccaccgtcgcccgcccgcccgggcccctgcagccgcccaggtgccagcacggagcgcctggcggcggaacgcagaccccaggcccggcgcacaccggggacgctgagcgttccaggcgggagggaaggcgggcagagatggagagaggaacgggagtcctagaggggcggaaggacgggcggagggacgttaggagggagggagggaggcagggaggcagggaggaacggagggaaagacagagcgacgcagggactgggggcgggcgggagggagccggggaacggggggaggaaggcagggaggaaaagcggtcctcggcctccgggagtagcgggacccccgccctccgggaaaacggtcagcgtccggcgcgggctgagggctgggcccacagccgccgcgccggccggcggggcaccacccattcgccccggttccgtggcccagggagtgggcggtttcctccgggacaaaagaccgggactcgggttgccgtcgggtgttcacccgcgcggttcacagaccgcacatccccaggctgagccctgcaacgcggcgcgaggccgacagccccggccacggaggagccacacgcaggacgacggaggcgtgattttggtttccgcgtggctttgccctccgcaaggcggcctgttgctcaagtctctccggcccccgaaaggctggccatgccgactgtttgctcccggagctctgcgggcacccggaaacatgcagggaagggtgcaagcccggcacggtgccttcgctctccttgccaggttccaaaccggccacactgcagactccccacgttgccgcacgcgggaatccatcgtcaggccatcacgccggggaggcatctcctctctggggtgtcgctctggacttctacgtggaaatgaacgagagccacacgcctgcgtgtgccagaccgtcccggcaacggcgacgcccacaggcattgcctccttcacggagagagggcctggcacactcaagactcccacggaggttcagttccacactccacctaggtcatatttttagtttaaaaaaataattatatgttttataatgaaaagaatctcattatctttcagtattaggttgatttatattccaaagaataatatttttgttaaattgttgatttttgtaaacctctaaatgtttgttgctaaaattactgtgtttaagaaaaagattaataaataataataatttcataattaaaaacttctttcattgaatgccattaaataaaccattattttacaaaataagatcaacataattgagtaaataataataagaacaatattatagtacaacaaaatatgggtatgtcataccctgccacattcttgatgtaactttttttcacctcatgctcgccgggttaagggctacaatgaactcgaaacgaccggtttgcatttttagacatttagaagcctatatcttgttacagaattggaattacacaaaaattctaccatattttgaaagcttaggttgttctgaaaaaaacaatatattgttttcctgggtaaactaaaagtcccctcgaggaaaggcccctaaagtgaaacagtgcaaaacgttcaaaaactgtctggcaatacaagttccactttgaccaaaacggctggcagtaaaagggttaagcggccgctcagccttgagcggtatcagctcactcaaaggcggtaatacggttatccacagaatcaggggataacgcaggaaagaacatgtgagcaaaaggccagcaaaaggccaggaaccgtaaaaaggccgcgttgctggcgtttttccataggctccgcccccctgacgagcatcacaaaaatcgacgctcaagtcagaggtggcgaaacccgacaggactataaagataccaggcgtttccccctggaagctccctcgtgcgctctcctgttccgaccctgccgcttaccggatacctgtccgcctttctcccttcgggaagcgtggcgctttctcatagctcacgctgtaggtatctcagttcggtgtaggtcgttcgctccaagctgggctgtgtgcacgaaccccccgttcagcccgaccgctgcgccttatccggtaactatcgtcttgagtccaacccggtaagacacgacttatcgccactggcagcagccactggtaacaggattagcagagcgaggtatgtaggcggtgctacagagttcttgaagtggtgggctaactacggctacactagaagaacagtatttggtatctgcgctctgctgaagccagttaccttcggaaaaagagttggtagctcttgatccggcaaacaaaccaccgctggtagcggtggtttttttgtttgcaagcagcagattacgcgcagaaaaaaaggatctcaagaagatcctttgatcttttctacggggtctgacgctcagtggaacgacgcgcgcgtaactcacgttaagggattttggtcatgagttagaaaaactcatcgagcatcaaatgaaactgcaatttattcatatcaggattatcaataccatatttttgaaaaagccgtttctgtaatgaaggagaaaactcaccgaggcagttccataggatggcaagatcctggtatcggtctgcgattccgactcgtccaacatcaatacaacctattaatttcccctcgtcaaaaataaggttatcaagtgagaaatcaccatgagtgacgactgaatccggtgagaatggcaaaagtttatgcatttctttccagacttgttcaacaggccagccattacgctcgtcatcaaaatcactcgcatcaaccaaaccgttattcattcgtgattgcgcctgagcgaggcgaaatacgcgatcgctgttaaaaggacaattacaaacaggaatcgagtgcaaccggcgcaggaacactgccagcgcatcaacaatattttcacctgaatcaggatattcttctaatacctggaacgctgtttttccggggatcgcagtggtgagtaaccatgcatcatcaggagtacggataaaatgcttgatggtcggaagtggcataaattccgtcagccagtttagtctgaccatctcatctgtaacatcattggcaacgctacctttgccatgtttcagaaacaactctggcgcatcgggcttcccatacaagcgatagattgtcgcacctgattgcccgacattatcgcgagcccatttatacccatataaatcagcatccatgttggaatttaatcgcggcctcgacgtttcccgttggatatggctcattttttacttcctcaccttgtcgtattatactatgccgatatactatgccgatgattaattgtcgacactgcgggggctctggcgcgccttaacctttttactgccaatgacgcatgggatacgtcgtggcagtaaaagggcttaaatgccaacgacgcgtcccatacgttgttggcattttaattcttctctctgcagcggcagcatgtgccgccgctgcagagagtttctagcgatgacagcccctctgggcaacgagccgggggggctgtcccatgacgcggctagacatgcacgaccattaacccggcgagcatgaggcagggtatctcataccctggtaaaattttaaagttgtgtattttataaaattttcgtctgacaacactagcgcgctcagtagctggaggcaggagcgtgcgggaggggatagtggcgtgatcgcagtgtggcacgggacaccggcgagatattcgtgtgcaaacctgtttcgggtatgttataccctgcctcattgttgacgtattttttttatgtaatttttccgattattaatttcaactgttttattggtatttttatgttatccattgttctttttttatgatttactgtatcggttgtctttcgttcctttagttgagtttttttttattattttcagtttttgatcaaagctagcgcgagctcacggggacagcccccccccaaagcccccagggatgtaattacgtccctcccccgctagggggcagcagcgagccgcccggggctccgctccggtccggcgctccccccgcatccccgagccggcagcgtgcggggacagcccgggcacggggaaggtggcacgggatcgctttcctctgaacgcttctcgctgctctttgagcctgcagacacctggggggatacggggaaaaagctttaggctgaaagagagatttagaatgacagaatcatagaacggcctgggttgcaaaggagcacagtgctcatccagatccaaccccctgctatgtgcagggtcatcaaccagcagcccaggctgcccagagccacatccagcctggccttgaatgcctgcagggatggggcatccacagcctccttgggcaacctgttcagtgcgtcaccaccctctgggggaaaaactgcctcctcatatccaacccaaacctcccctgtctcagtgtaaagccattcccccttgtcctatcaagggggagtttgctgtgacattgttggtctggggtgacacatgtttgccaattcagtgcatcacggagaggcagatcttggggataaggaagtgcaggacagcatggacgtgggacatgctggtgttgagggctctgggacactctccaagtcacagcgttcagaacagccttaaggataagaagataggatagaaggacaaagagcaagttaaaacccagcatggagaggagcacaaaaaggccacagacactgctggtccctgtgtctgagcctgcatgtttgatggtgtctggatgcaagcagaaggggtggaagtgcttgcctggagagatacagctgggtcagtaggactgggacaggcagctggagaattgccatgtagatgttcatacaatcgtcaaatcatgaaggctggaaaagccctccaagatccccaagaccaaccccaacccacccaccgtgcccactggccatgtccctcagtgccacatccccacagttcttcatcacctccagggacggtgacccccccacctccgtgggcagctgtgccactgcagcaccgctctttggagaaggtaaatcttgctaaatccagcccgaccctcccctggcacaacgtaaggccattatctctcatccaactccaggacggagtcagtgagaatattggtaccggggtgtggtgtcttcttaacctcacccaggaggaaccgggtcaattcttcagcacctgggtacccatagagcccaccgcatccccagcatgcctgctattgtattcccaatcctcccccttgctgtcctgccccaccccaccccccagaatagaatgacacctactcagacaatgcgatgcaatttcctcattttattaggaaaggacagtgggagtggcaccttccagggtcaaggaaggcacgggggaggggcaaacaacagatggctggcaagagagcaggtttactgataggtatcgagatcgacggccttgaccacttccaccaggcacatgtgatctctcctctcatcgcggtctttggagagcttagtgtgataagtgatatgatggtagcgcggaatgtggacagccgctgaaccggccagtggccgattcatctggctacacttggtcaccagcttctccgtcaccccctcgatgtcgtaggcttgattgaactccacgcggattccgttgttcacagtgtcggggagaatgtaaaggatgctgggagggcactggaaggcgacattcttccgaagaatatgcccgtccttcttaaagttttctccagtcagagtcacccggttgtagatagatcccctctcataggtgaccatcgcgcgggtcttgtacactccatctccctcaaaagaaatggtgcgctcttgggtataaccttccggcatggcggatttgaagaagtccttaatgtggctagggtacttagcaaaacactgcactccatacgagagggttgacacaagggtggcccaaggcactggcagatctccagtggtacagatatacttggccttaatggttccagtcgtagcgtccccggttccttctcccttgatgatgaacttcattccttcgacgtccccttccagctcggtgatgtacggaatctccttctcaaacagcttagcaccttcggtcagggcagtcatggtggcggcccttctgcaaaaagaacaagcaagctcttgtctatgagaagaggctgcgggagaagaaagtcagattagcgtggccagtcccctccccccacccgcctccattcccgccgcatgccccatcacgtcctctaccatcctctgcaatgcggagcctgggctcggcttccggacctcgcaccagcgcccctaaacccgtacagcgtccttccccccattcctaatttccattcctctccggcctcctgcggcccagtccttttttttcttttctttttcacctggcactgcacaagaagatgcggctgtctctagaacagggaggagcagagagcaccagggagggctgcagtccgtatttataggaactggatggtggggggagctgatgacgcgcgccccgcctcccgctcggctcatccagtcccagctcaagggcgcagaggcctgagctacgtgcacccgtaaagccgcgagtagctgggcctctctcattccccccctccctctttttggacccgcctcgtttttgaaatgtgcacgcaccaagcgtgtgggctccgacctgagagggggaggggagctgagattgtcccgccgaggaagtgaccggatgagggttcccaggataggactcagggaatacagactatggattaaggacgaggagtccttggagtgtgcaccaaggacatccaggacccagaaaccagaaagctgcttcccgaataaaatgggagaatctgagagctgcaggaaccagggaaatggagcagaagtgtgggtctgcccaaggctgccccatcgaacttctccctattagtgaaaaggcttaggagaagttgaggatcttctcgttgttcttcggaagactactctggagacgtctaccgggtaggggaggcgcttttcccaaggcagtctggagcatgcgctttagcagccccgctgggcacttggcgctacacaagtggcctctggcctcgcacacattccacatccaccggtaggcgccaaccggctccgttctttggtggccccttcgcgccaccttctactcctcccctagtcaggaagttcccccccgccccgcagctcgcgtcgtgcaggacgtgacaaatggaagtagcacgactcactagtctcgtgcagatggacagcaccgctgagcaatggaagcgggtaggcctttggggcagcggccaatagcagctttgctccttcgctttctgagagcagcggccgggaaggggcggtgcgggaggcggggtgtggggcggtagtgtgggccctgttcctgcccgcgcggtgttccgcattctgcaagcctccggagcgcacgtccgtctcaggggcagcttgcttgttctttttgcagaagctcagaataaacgctcaactttggccgccacc

SEQ ID NO: 226 - DNA, 11286 bp, Artificial Sequence
  Synthetic
atggcactccctgtcaccgccctcctcctcccactcgccctcttgctgcacgccgctcgcccggatattcagatgacgcagaccacctcaagtctgtcggcctcccttggtgatcgggtcaccatttcctgccgagccagccaggacatctccaagtacctgaactggtaccagcagaagcccgacgggaccgtgaagctgctgatctaccatacctcccggctgcatagcggggtgccgtcaaggtttagcggatcgggatccggcaccgactactcgctgactatctccaacttggaacaagaggacatcgccacctacttctgtcaacaagggaatactctgccctacactttcggcgggggaaccaagctcgagatcactggcggcggcggctcgggcggtggtggatccgggggcggtggctccgaggtcaagcttcaggaatccggacccggcctggtggcaccgtcacaatccctatccgtgacatgcaccgtcagcggagtgtcgctgcccgattacggagtgtcttggattaggcagcccccgcgcaaaggtcttgagtggctgggagtgatctggggatcagagactacctactacaacagcgccctcaagtcgaggctcaccatcatcaaggacaactccaagtcccaagtgtttctgaagatgaactccctgcaaactgacgacaccgccatctactactgcgcgaagcactactactacgggggaagctacgctatggactattggggacagggaacttccgtgactgtgtccagcaccacgacaccagccccgcgcccgccgacccccgccccgaccattgcgagccagccgctgagccttcggccggaagcctgcaggcccgcggccggcggagccgtgcacaccagaggactggacttcgcctgcgatatctatatctgggcgcctctggccggaacctgtggagtcctgctgctgtcactcgtgattactctgtactgcaagcgcggtcggaagaagctgctctacattttcaagcaacctttcatgcggccagtgcagaccactcaggaagaagatggctgttcctgccggttccctgaagaagaagagggcggctgcgaattgagagtgaagttctcccgctcggctgacgctcccgcctacaaacaggggcagaaccagctgtataacgaactgaacctcgggcgccgcgaggaatacgacgtgctggacaagcggagaggccgcgatcctgagatggggggaaagccccggagaaagaaccctcaggagggcctgtacaatgagctgcagaaagacaaaatggccgaggcgtacagcgagatcggcatgaagggcgaacgccggagaggaaagggacacgacggactgtaccagggactgtccaccgcgaccaaggatacctacgacgccctgcacatgcaggcactgccacctcggtgataaaaattaatggctaataaaggaaatttattttcattgcaatagtgtgttggaattttttgtgtctctcactcggaagaacatatgggagggcaaatcatttaaaacatcagaatgagtatttggtttagagtttggcaacatatgcccatatgctggctgccatgaacaaaggttggctataaagaggtcatcagtatatgaaacagccccctgctgtccattccttattccatagaaaagccttgacttgaggttagattttttttatattttgttttgtgttatttttttctttaacatccctaaaattttccttacatgttttactagccagatttttcctcctctcctgactactcccagtcatagctgtccctcttctcttatggagatcagaaaattttgtgtcgcccttcgctgaacaccaggtgggccgcctactgcgcacgcgcgggtttgcgggcagccgcctgggctgtgggagcagcccgggcagagctctcctgcctctccaccagcccaccccgccgcctgaccgccccctccccaccccccaccccccacccccggaaaacgcgtcgtcccctgggctgggtggtgacccccgtcccgcgaaacaccgggccccgcgcagcgtccgggcctgacaccgctccggcggctcgcctcctatgcgcccccgcgccaccgtcgcccgcccgcccgggcccctgcagccgcccaggtgccagcacggagcgcctggcggcggaacgcagaccccaggcccggcgcacaccggggacgctgagcgttccaggcgggagggaaggcgggcagagatggagagaggaacgggagtcctagaggggcggaaggacgggcggagggacgttaggagggagggagggaggcagggaggcagggaggaacggagggaaagacagagcgacgcagggactgggggcgggcgggagggagccggggaacggggggaggaaggcagggaggaaaagcggtcctcggcctccgggagtagcgggacccccgccctccgggaaaacggtcagcgtccggcgcgggctgagggctgggcccacagccgccgcgccggccggcggggcaccacccattcgccccggttccgtggcccagggagtgggcggtttcctccgggacaaaagaccgggactcgggttgccgtcgggtgttcacccgcgcggttcacagaccgcacatccccaggctgagccctgcaacgcggcgcgaggccgacagccccggccacggaggagccacacgcaggacgacggaggcgtgattttggtttccgcgtggctttgccctccgcaaggcggcctgttgctcaagtctctccggcccccgaaaggctggccatgccgactgtttgctcccggagctctgcgggcacccggaaacatgcagggaagggtgcaagcccggcacggtgccttcgctctccttgccaggttccaaaccggccacactgcagactccccacgttgccgcacgcgggaatccatcgtcaggccatcacgccggggaggcatctcctctctggggtgtcgctctggacttctacgtggaaatgaacgagagccacacgcctgcgtgtgccagaccgtcccggcaacggcgacgcccacaggcattgcctccttcacggagagagggcctggcacactcaagactcccacggaggttcagttccacactccacctaggtcatatttttagtttaaaaaaataattatatgttttataatgaaaagaatctcattatctttcagtattaggttgatttatattccaaagaataatatttttgttaaattgttgatttttgtaaacctctaaatgtttgttgctaaaattactgtgtttaagaaaaagattaataaataataataatttcataattaaaaacttctttcattgaatgccattaaataaaccattattttacaaaataagatcaacataattgagtaaataataataagaacaatattatagtacaacaaaatatgggtatgtcataccctgccacattcttgatgtaactttttttcacctcatgctcgccgggttaagggctacaatgaactcgaaacgaccggtttgcatttttagacatttagaagcctatatcttgttacagaattggaattacacaaaaattctaccatattttgaaagcttaggttgttctgaaaaaaacaatatattgttttcctgggtaaactaaaagtcccctcgaggaaaggcccctaaagtgaaacagtgcaaaacgttcaaaaactgtctggcaatacaagttccactttgaccaaaacggctggcagtaaaagggttaagcggccgctcagccttgagcggtatcagctcactcaaaggcggtaatacggttatccacagaatcaggggataacgcaggaaagaacatgtgagcaaaaggccagcaaaaggccaggaaccgtaaaaaggccgcgttgctggcgtttttccataggctccgcccccctgacgagcatcacaaaaatcgacgctcaagtcagaggtggcgaaacccgacaggactataaagataccaggcgtttccccctggaagctccctcgtgcgctctcctgttccgaccctgccgcttaccggatacctgtccgcctttctcccttcgggaagcgtggcgctttctcatagctcacgctgtaggtatctcagttcggtgtaggtcgttcgctccaagctgggctgtgtgcacgaaccccccgttcagcccgaccgctgcgccttatccggtaactatcgtcttgagtccaacccggtaagacacgacttatcgccactggcagcagccactggtaacaggattagcagagcgaggtatgtaggcggtgctacagagttcttgaagtggtgggctaactacggctacactagaagaacagtatttggtatctgcgctctgctgaagccagttaccttcggaaaaagagttggtagctcttgatccggcaaacaaaccaccgctggtagcggtggtttttttgtttgcaagcagcagattacgcgcagaaaaaaaggatctcaagaagatcctttgatcttttctacggggtctgacgctcagtggaacgacgcgcgcgtaactcacgttaagggattttggtcatgagttagaaaaactcatcgagcatcaaatgaaactgcaatttattcatatcaggattatcaataccatatttttgaaaaagccgtttctgtaatgaaggagaaaactcaccgaggcagttccataggatggcaagatcctggtatcggtctgcgattccgactcgtccaacatcaatacaacctattaatttcccctcgtcaaaaataaggttatcaagtgagaaatcaccatgagtgacgactgaatccggtgagaatggcaaaagtttatgcatttctttccagacttgttcaacaggccagccattacgctcgtcatcaaaatcactcgcatcaaccaaaccgttattcattcgtgattgcgcctgagcgaggcgaaatacgcgatcgctgttaaaaggacaattacaaacaggaatcgagtgcaaccggcgcaggaacactgccagcgcatcaacaatattttcacctgaatcaggatattcttctaatacctggaacgctgtttttccggggatcgcagtggtgagtaaccatgcatcatcaggagtacggataaaatgcttgatggtcggaagtggcataaattccgtcagccagtttagtctgaccatctcatctgtaacatcattggcaacgctacctttgccatgtttcagaaacaactctggcgcatcgggcttcccatacaagcgatagattgtcgcacctgattgcccgacattatcgcgagcccatttatacccatataaatcagcatccatgttggaatttaatcgcggcctcgacgtttcccgttggatatggctcattttttacttcctcaccttgtcgtattatactatgccgatatactatgccgatgattaattgtcgacactgcgggggctctggcgcgccttaacctttttactgccaatgacgcatgggatacgtcgtggcagtaaaagggcttaaatgccaacgacgcgtcccatacgttgttggcattttaattcttctctctgcagcggcagcatgtgccgccgctgcagagagtttctagcgatgacagcccctctgggcaacgagccgggggggctgtcccatgacgcggctagacatgcacgaccattaacccggcgagcatgaggcagggtatctcataccctggtaaaattttaaagttgtgtattttataaaattttcgtctgacaacactagcgcgctcagtagctggaggcaggagcgtgcgggaggggatagtggcgtgatcgcagtgtggcacgggacaccggcgagatattcgtgtgcaaacctgtttcgggtatgttataccctgcctcattgttgacgtattttttttatgtaatttttccgattattaatttcaactgttttattggtatttttatgttatccattgttctttttttatgatttactgtatcggttgtctttcgttcctttagttgagtttttttttattattttcagtttttgatcaaagctagcgcgagctcacggggacagcccccccccaaagcccccagggatgtaattacgtccctcccccgctagggggcagcagcgagccgcccggggctccgctccggtccggcgctccccccgcatccccgagccggcagcgtgcggggacagcccgggcacggggaaggtggcacgggatcgctttcctctgaacgcttctcgctgctctttgagcctgcagacacctggggggatacggggaaaaagctttaggctgaaagagagatttagaatgacagaatcatagaacggcctgggttgcaaaggagcacagtgctcatccagatccaaccccctgctatgtgcagggtcatcaaccagcagcccaggctgcccagagccacatccagcctggccttgaatgcctgcagggatggggcatccacagcctccttgggcaacctgttcagtgcgtcaccaccctctgggggaaaaactgcctcctcatatccaacccaaacctcccctgtctcagtgtaaagccattcccccttgtcctatcaagggggagtttgctgtgacattgttggtctggggtgacacatgtttgccaattcagtgcatcacggagaggcagatcttggggataaggaagtgcaggacagcatggacgtgggacatgctggtgttgagggctctgggacactctccaagtcacagcgttcagaacagccttaaggataagaagataggatagaaggacaaagagcaagttaaaacccagcatggagaggagcacaaaaaggccacagacactgctggtccctgtgtctgagcctgcatgtttgatggtgtctggatgcaagcagaaggggtggaagtgcttgcctggagagatacagctgggtcagtaggactgggacaggcagctggagaattgccatgtagatgttcatacaatcgtcaaatcatgaaggctggaaaagccctccaagatccccaagaccaaccccaacccacccaccgtgcccactggccatgtccctcagtgccacatccccacagttcttcatcacctccagggacggtgacccccccacctccgtgggcagctgtgccactgcagcaccgctctttggagaaggtaaatcttgctaaatccagcccgaccctcccctggcacaacgtaaggccattatctctcatccaactccaggacggagtcagtgagaatattggtaccggggtgtggtgtcttcttaacctcacccaggaggaaccgggtcaattcttcagcacctgggtacccatagagcccaccgcatccccagcatgcctgctattgtattcccaatcctcccccttgctgtcctgccccaccccaccccccagaatagaatgacacctactcagacaatgcgatgcaatttcctcattttattaggaaaggacagtgggagtggcaccttccagggtcaaggaaggcacgggggaggggcaaacaacagatggctggcaagagagcaggtttactgataggtatcgagatcgacggccttgaccacttccaccaggcacatgtgatctctcctctcatcgcggtctttggagagcttagtgtgataagtgatatgatggtagcgcggaatgtggacagccgctgaaccggccagtggccgattcatctggctacacttggtcaccagcttctccgtcaccccctcgatgtcgtaggcttgattgaactccacgcggattccgttgttcacagtgtcggggagaatgtaaaggatgctgggagggcactggaaggcgacattcttccgaagaatatgcccgtccttcttaaagttttctccagtcagagtcacccggttgtagatagatcccctctcataggtgaccatcgcgcgggtcttgtacactccatctccctcaaaagaaatggtgcgctcttgggtataaccttccggcatggcggatttgaagaagtccttaatgtggctagggtacttagcaaaacactgcactccatacgagagggttgacacaagggtggcccaaggcactggcagatctccagtggtacagatatacttggccttaatggttccagtcgtagcgtccccggttccttctcccttgatgatgaacttcattccttcgacgtccccttccagctcggtgatgtacggaatctccttctcaaacagcttagcaccttcggtcagggcagtcatggtggcggcccttctgcaaaaagaacaagcaagctcttgtctatgagaagaggctgcgggagaagaaagtcagattagcgtggccagtcccctccccccacccgcctccattcccgccgcatgccccatcacgtcctctaccatcctctgcaatgcggagcctgggctcggcttccggacctcgcaccagcgcccctaaacccgtacagcgtccttccccccattcctaatttccattcctctccggcctcctgcggcccagtccttttttttcttttctttttcacctggcactgcacaagaagatgcggctgtctctagaacagggaggagcagagagcaccagggagggctgcagtccgtatttataggaactggatggtggggggagctgatgacgcgcgccccgcctcccgctcggctcatccagtcccagctcaagggcgcagaggcctgagctacgtgcacccgtaaagccgcgagtagctgggcctctctcattccccccctccctctttttggacccgcctcgtttttgaaatgtgcacgcaccaagcgtgtgggctccgacctgagagggggaggggagctgagattgtcccgccgaggaagtgaccggatgagggttcccaggataggactcagggaatacagactatggattaaggacgaggagtccttggagtgtgcaccaaggacatccaggacccagaaaccagaaagctgcttcccgaataaaatgggagaatctgagagctgcaggaaccagggaaatggagcagaagtgtgggtctgcccaaggctgccccatcgaacttctccctattagtgaaaaggcttaggagaagttgaggatcttctcgttgttcttcggaagactactctggagacgtctaccgggtaggggaggcgcttttcccaaggcagtctggagcatgcgctttagcagccccgctgggcacttggcgctacacaagtggcctctggcctcgcacacattccacatccaccggtaggcgccaaccggctccgttctttggtggccccttcgcgccaccttctactcctcccctagtcaggaagttcccccccgccccgcagctcgcgtcgtgcaggacgtgacaaatggaagtagcacgactcactagtctcgtgcagatggacagcaccgctgagcaatggaagcgggtaggcctttggggcagcggccaatagcagctttgctccttcgctttctgagagcagcggccgggaaggggcggtgcgggaggcggggtgtggggcggtagtgtgggccctgttcctgcccgcgcggtgttccgcattctgcaagcctccggagcgcacgtccgtctcaggggcagcttgcttgttctttttgcagaagctcagaataaacgctcaactttggccgccaccatgggagcacccaccctgcctcccgcttggcaaccgttcctgaaagaccaccggatttcgaccttcaagaattggccgttcctcgagggctgtgcctgcactcctgagcggatggccgaggccgggttcatccactgtccaaccgagaacgaacctgacctggcccagtgcttcttctgctttaaggaacttgagggttgggagccggacgatgaccccatcgaagaacacaagaagcattcctccggctgcgccttcctgagcgtgaagaaacagttcgaagaactgactctgggagagttcttgaagctcgacagagagcgcgccaagaacaagatcgcgaaggaaaccaacaacaagaagaaagaatttgaggaaaccgcgaagaaggtccgcagggcgattgaacagctggctgccatggattgataaaagcttaatgctggagcctcggtagccgttcctcctgcccgctgggcctcccaacgggccctcctcccctccttgcaccggcccttcctggtctttgaataaagtttacctgactcatggtcctttcactttcacatgggatttcccagttatgaaattaataaaaatcagtgatttccacatctgtgtgtgcctgtgccaggctgggtggggaacaggaggccgagatgattccgggaactgtcagaaggaatcaatgatttccacatcctgtctgtcttatgtcttggggggtggggaggccaggaagattccaggaaggtcagagtcaatcaatggtttccacatctctcagtgcctctatctggaggccaggtagggctggccttgggggagggggaggccagaatgactccaagagctacaggaaggggggagggggaaaaaggccagaataattccaggaaccgccaagaagatgacgtcgaggagaagttccccaactttcccgcctctcagcctttgaaagaaagaaaggggagggggcaggccgcgtgcagccgcgagcggtgctgggctccggctccaattccccatctcagtcgttcccaaagtcctcctgtttcatccaagcgtgtaagggtccccgtccttgactccctagtgtcctgctgcccacagtccagtcctgggaaccagcaccgatcacctcccatcgggccaatctcagtcccttcccccctacgtcggggcccacacgctcggtgcgtgcccagttgaaccaggcggctgcggaaaaaaaaaagcggggagaaagtagggcccggctactagcggttttacgggcgcacgtagctcaggcctcaagaccttgggctgggactggctgagcctggcgggaggcggggtccgagtcaccgcctgccgccgcgcccccggtttctataaattgagcccgcagcctcccgcttcgctctctgctcctcctgttcgacagtcagccgcatcttcttttgcgtcgccagggggagcttgcttgttctttttgcagaagctcagaataaacgctcaactttggccgccacc

SEQ ID NO: 227 - DNA, 11520 bp, Artificial Sequence
  Synthetic
atggcactccctgtcaccgccctcctcctcccactcgccctcttgctgcacgccgctcgcccggatattcagatgacgcagaccacctcaagtctgtcggcctcccttggtgatcgggtcaccatttcctgccgagccagccaggacatctccaagtacctgaactggtaccagcagaagcccgacgggaccgtgaagctgctgatctaccatacctcccggctgcatagcggggtgccgtcaaggtttagcggatcgggatccggcaccgactactcgctgactatctccaacttggaacaagaggacatcgccacctacttctgtcaacaagggaatactctgccctacactttcggcgggggaaccaagctcgagatcactggcggcggcggctcgggcggtggtggatccgggggcggtggctccgaggtcaagcttcaggaatccggacccggcctggtggcaccgtcacaatccctatccgtgacatgcaccgtcagcggagtgtcgctgcccgattacggagtgtcttggattaggcagcccccgcgcaaaggtcttgagtggctgggagtgatctggggatcagagactacctactacaacagcgccctcaagtcgaggctcaccatcatcaaggacaactccaagtcccaagtgtttctgaagatgaactccctgcaaactgacgacaccgccatctactactgcgcgaagcactactactacgggggaagctacgctatggactattggggacagggaacttccgtgactgtgtccagcaccacgacaccagccccgcgcccgccgacccccgccccgaccattgcgagccagccgctgagccttcggccggaagcctgcaggcccgcggccggcggagccgtgcacaccagaggactggacttcgcctgcgatatctatatctgggcgcctctggccggaacctgtggagtcctgctgctgtcactcgtgattactctgtactgcaagcgcggtcggaagaagctgctctacattttcaagcaacctttcatgcggccagtgcagaccactcaggaagaagatggctgttcctgccggttccctgaagaagaagagggcggctgcgaattgagagtgaagttctcccgctcggctgacgctcccgcctacaaacaggggcagaaccagctgtataacgaactgaacctcgggcgccgcgaggaatacgacgtgctggacaagcggagaggccgcgatcctgagatggggggaaagccccggagaaagaaccctcaggagggcctgtacaatgagctgcagaaagacaaaatggccgaggcgtacagcgagatcggcatgaagggcgaacgccggagaggaaagggacacgacggactgtaccagggactgtccaccgcgaccaaggatacctacgacgccctgcacatgcaggcactgccacctcggtgataaaaattaatggctaataaaggaaatttattttcattgcaatagtgtgttggaattttttgtgtctctcactcggaagaacatatgggagggcaaatcatttaaaacatcagaatgagtatttggtttagagtttggcaacatatgcccatatgctggctgccatgaacaaaggttggctataaagaggtcatcagtatatgaaacagccccctgctgtccattccttattccatagaaaagccttgacttgaggttagattttttttatattttgttttgtgttatttttttctttaacatccctaaaattttccttacatgttttactagccagatttttcctcctctcctgactactcccagtcatagctgtccctcttctcttatggagatcagaaaattttgtgtcgcccttcgctgaacaccaggtgggccgcctactgcgcacgcgcgggtttgcgggcagccgcctgggctgtgggagcagcccgggcagagctctcctgcctctccaccagcccaccccgccgcctgaccgccccctccccaccccccaccccccacccccggaaaacgcgtcgtcccctgggctgggtggtgacccccgtcccgcgaaacaccgggccccgcgcagcgtccgggcctgacaccgctccggcggctcgcctcctatgcgcccccgcgccaccgtcgcccgcccgcccgggcccctgcagccgcccaggtgccagcacggagcgcctggcggcggaacgcagaccccaggcccggcgcacaccggggacgctgagcgttccaggcgggagggaaggcgggcagagatggagagaggaacgggagtcctagaggggcggaaggacgggcggagggacgttaggagggagggagggaggcagggaggcagggaggaacggagggaaagacagagcgacgcagggactgggggcgggcgggagggagccggggaacggggggaggaaggcagggaggaaaagcggtcctcggcctccgggagtagcgggacccccgccctccgggaaaacggtcagcgtccggcgcgggctgagggctgggcccacagccgccgcgccggccggcggggcaccacccattcgccccggttccgtggcccagggagtgggcggtttcctccgggacaaaagaccgggactcgggttgccgtcgggtgttcacccgcgcggttcacagaccgcacatccccaggctgagccctgcaacgcggcgcgaggccgacagccccggccacggaggagccacacgcaggacgacggaggcgtgattttggtttccgcgtggctttgccctccgcaaggcggcctgttgctcaagtctctccggcccccgaaaggctggccatgccgactgtttgctcccggagctctgcgggcacccggaaacatgcagggaagggtgcaagcccggcacggtgccttcgctctccttgccaggttccaaaccggccacactgcagactccccacgttgccgcacgcgggaatccatcgtcaggccatcacgccggggaggcatctcctctctggggtgtcgctctggacttctacgtggaaatgaacgagagccacacgcctgcgtgtgccagaccgtcccggcaacggcgacgcccacaggcattgcctccttcacggagagagggcctggcacactcaagactcccacggaggttcagttccacactccacctaggtcatatttttagtttaaaaaaataattatatgttttataatgaaaagaatctcattatctttcagtattaggttgatttatattccaaagaataatatttttgttaaattgttgatttttgtaaacctctaaatgtttgttgctaaaattactgtgtttaagaaaaagattaataaataataataatttcataattaaaaacttctttcattgaatgccattaaataaaccattattttacaaaataagatcaacataattgagtaaataataataagaacaatattatagtacaacaaaatatgggtatgtcataccctgccacattcttgatgtaactttttttcacctcatgctcgccgggttaagggctacaatgaactcgaaacgaccggtttgcatttttagacatttagaagcctatatcttgttacagaattggaattacacaaaaattctaccatattttgaaagcttaggttgttctgaaaaaaacaatatattgttttcctgggtaaactaaaagtcccctcgaggaaaggcccctaaagtgaaacagtgcaaaacgttcaaaaactgtctggcaatacaagttccactttgaccaaaacggctggcagtaaaagggttaagcggccgctcagccttgagcggtatcagctcactcaaaggcggtaatacggttatccacagaatcaggggataacgcaggaaagaacatgtgagcaaaaggccagcaaaaggccaggaaccgtaaaaaggccgcgttgctggcgtttttccataggctccgcccccctgacgagcatcacaaaaatcgacgctcaagtcagaggtggcgaaacccgacaggactataaagataccaggcgtttccccctggaagctccctcgtgcgctctcctgttccgaccctgccgcttaccggatacctgtccgcctttctcccttcgggaagcgtggcgctttctcatagctcacgctgtaggtatctcagttcggtgtaggtcgttcgctccaagctgggctgtgtgcacgaaccccccgttcagcccgaccgctgcgccttatccggtaactatcgtcttgagtccaacccggtaagacacgacttatcgccactggcagcagccactggtaacaggattagcagagcgaggtatgtaggcggtgctacagagttcttgaagtggtgggctaactacggctacactagaagaacagtatttggtatctgcgctctgctgaagccagttaccttcggaaaaagagttggtagctcttgatccggcaaacaaaccaccgctggtagcggtggtttttttgtttgcaagcagcagattacgcgcagaaaaaaaggatctcaagaagatcctttgatcttttctacggggtctgacgctcagtggaacgacgcgcgcgtaactcacgttaagggattttggtcatgagttagaaaaactcatcgagcatcaaatgaaactgcaatttattcatatcaggattatcaataccatatttttgaaaaagccgtttctgtaatgaaggagaaaactcaccgaggcagttccataggatggcaagatcctggtatcggtctgcgattccgactcgtccaacatcaatacaacctattaatttcccctcgtcaaaaataaggttatcaagtgagaaatcaccatgagtgacgactgaatccggtgagaatggcaaaagtttatgcatttctttccagacttgttcaacaggccagccattacgctcgtcatcaaaatcactcgcatcaaccaaaccgttattcattcgtgattgcgcctgagcgaggcgaaatacgcgatcgctgttaaaaggacaattacaaacaggaatcgagtgcaaccggcgcaggaacactgccagcgcatcaacaatattttcacctgaatcaggatattcttctaatacctggaacgctgtttttccggggatcgcagtggtgagtaaccatgcatcatcaggagtacggataaaatgcttgatggtcggaagtggcataaattccgtcagccagtttagtctgaccatctcatctgtaacatcattggcaacgctacctttgccatgtttcagaaacaactctggcgcatcgggcttcccatacaagcgatagattgtcgcacctgattgcccgacattatcgcgagcccatttatacccatataaatcagcatccatgttggaatttaatcgcggcctcgacgtttcccgttggatatggctcattttttacttcctcaccttgtcgtattatactatgccgatatactatgccgatgattaattgtcgacactgcgggggctctggcgcgccttaacctttttactgccaatgacgcatgggatacgtcgtggcagtaaaagggcttaaatgccaacgacgcgtcccatacgttgttggcattttaattcttctctctgcagcggcagcatgtgccgccgctgcagagagtttctagcgatgacagcccctctgggcaacgagccgggggggctgtcccatgacgcggctagacatgcacgaccattaacccggcgagcatgaggcagggtatctcataccctggtaaaattttaaagttgtgtattttataaaattttcgtctgacaacactagcgcgctcagtagctggaggcaggagcgtgcgggaggggatagtggcgtgatcgcagtgtggcacgggacaccggcgagatattcgtgtgcaaacctgtttcgggtatgttataccctgcctcattgttgacgtattttttttatgtaatttttccgattattaatttcaactgttttattggtatttttatgttatccattgttctttttttatgatttactgtatcggttgtctttcgttcctttagttgagtttttttttattattttcagtttttgatcaaagctagcgcgagctcacggggacagcccccccccaaagcccccagggatgtaattacgtccctcccccgctagggggcagcagcgagccgcccggggctccgctccggtccggcgctccccccgcatccccgagccggcagcgtgcggggacagcccgggcacggggaaggtggcacgggatcgctttcctctgaacgcttctcgctgctctttgagcctgcagacacctggggggatacggggaaaaagctttaggctgaaagagagatttagaatgacagaatcatagaacggcctgggttgcaaaggagcacagtgctcatccagatccaaccccctgctatgtgcagggtcatcaaccagcagcccaggctgcccagagccacatccagcctggccttgaatgcctgcagggatggggcatccacagcctccttgggcaacctgttcagtgcgtcaccaccctctgggggaaaaactgcctcctcatatccaacccaaacctcccctgtctcagtgtaaagccattcccccttgtcctatcaagggggagtttgctgtgacattgttggtctggggtgacacatgtttgccaattcagtgcatcacggagaggcagatcttggggataaggaagtgcaggacagcatggacgtgggacatgctggtgttgagggctctgggacactctccaagtcacagcgttcagaacagccttaaggataagaagataggatagaaggacaaagagcaagttaaaacccagcatggagaggagcacaaaaaggccacagacactgctggtccctgtgtctgagcctgcatgtttgatggtgtctggatgcaagcagaaggggtggaagtgcttgcctggagagatacagctgggtcagtaggactgggacaggcagctggagaattgccatgtagatgttcatacaatcgtcaaatcatgaaggctggaaaagccctccaagatccccaagaccaaccccaacccacccaccgtgcccactggccatgtccctcagtgccacatccccacagttcttcatcacctccagggacggtgacccccccacctccgtgggcagctgtgccactgcagcaccgctctttggagaaggtaaatcttgctaaatccagcccgaccctcccctggcacaacgtaaggccattatctctcatccaactccaggacggagtcagtgagaatattggtaccggggtgtggtgtcttcttaacctcacccaggaggaaccgggtcaattcttcagcacctgggtacccatagagcccaccgcatccccagcatgcctgctattgtattcccaatcctcccccttgctgtcctgccccaccccaccccccagaatagaatgacacctactcagacaatgcgatgcaatttcctcattttattaggaaaggacagtgggagtggcaccttccagggtcaaggaaggcacgggggaggggcaaacaacagatggctggcaagagagcaggtttactgataggtatcgagatcgacggccttgaccacttccaccaggcacatgtgatctctcctctcatcgcggtctttggagagcttagtgtgataagtgatatgatggtagcgcggaatgtggacagccgctgaaccggccagtggccgattcatctggctacacttggtcaccagcttctccgtcaccccctcgatgtcgtaggcttgattgaactccacgcggattccgttgttcacagtgtcggggagaatgtaaaggatgctgggagggcactggaaggcgacattcttccgaagaatatgcccgtccttcttaaagttttctccagtcagagtcacccggttgtagatagatcccctctcataggtgaccatcgcgcgggtcttgtacactccatctccctcaaaagaaatggtgcgctcttgggtataaccttccggcatggcggatttgaagaagtccttaatgtggctagggtacttagcaaaacactgcactccatacgagagggttgacacaagggtggcccaaggcactggcagatctccagtggtacagatatacttggccttaatggttccagtcgtagcgtccccggttccttctcccttgatgatgaacttcattccttcgacgtccccttccagctcggtgatgtacggaatctccttctcaaacagcttagcaccttcggtcagggcagtcatggtggcggcccttctgcaaaaagaacaagcaagctcttgtctatgagaagaggctgcgggagaagaaagtcagattagcgtggccagtcccctccccccacccgcctccattcccgccgcatgccccatcacgtcctctaccatcctctgcaatgcggagcctgggctcggcttccggacctcgcaccagcgcccctaaacccgtacagcgtccttccccccattcctaatttccattcctctccggcctcctgcggcccagtccttttttttcttttctttttcacctggcactgcacaagaagatgcggctgtctctagaacagggaggagcagagagcaccagggagggctgcagtccgtatttataggaactggatggtggggggagctgatgacgcgcgccccgcctcccgctcggctcatccagtcccagctcaagggcgcagaggcctgagctacgtgcacccgtaaagccgcgagtagctgggcctctctcattccccccctccctctttttggacccgcctcgtttttgaaatgtgcacgcaccaagcgtgtgggctccgacctgagagggggaggggagctgagattgtcccgccgaggaagtgaccggatgagggttcccaggataggactcagggaatacagactatggattaaggacgaggagtccttggagtgtgcaccaaggacatccaggacccagaaaccagaaagctgcttcccgaataaaatgggagaatctgagagctgcaggaaccagggaaatggagcagaagtgtgggtctgcccaaggctgccccatcgaacttctccctattagtgaaaaggcttaggagaagttgaggatcttctcgttgttcttcggaagactactctggagacgtctaccgggtaggggaggcgcttttcccaaggcagtctggagcatgcgctttagcagccccgctgggcacttggcgctacacaagtggcctctggcctcgcacacattccacatccaccggtaggcgccaaccggctccgttctttggtggccccttcgcgccaccttctactcctcccctagtcaggaagttcccccccgccccgcagctcgcgtcgtgcaggacgtgacaaatggaagtagcacgactcactagtctcgtgcagatggacagcaccgctgagcaatggaagcgggtaggcctttggggcagcggccaatagcagctttgctccttcgctttctgagagcagcggccgggaaggggcggtgcgggaggcggggtgtggggcggtagtgtgggccctgttcctgcccgcgcggtgttccgcattctgcaagcctccggagcgcacgtccgtctcaggggcagcttgcttgttctttttgcagaagctcagaataaacgctcaactttggccgccaccatgctgaggctgctgctggctctgaacttgtttccatcaattcaagtcaccggcaacaagatccttgtgaagcagagccccatgctcgtggcgtacgataatgccgtgaacctgagctgcaaatattcgtacaacctgttctcgcgcgagttccgggcctcgctgcacaagggcctggactccgccgtggaagtctgcgtggtgtacgggaactacagccagcagctccaagtgtacagcaagaccggattcaactgtgacggaaagctcgggaacgaatccgtgactttctacctccaaaacctttacgtgaatcagaccgacatctacttctgcaagattgaagtcatgtaccctcctccctacctggagaacgagaagtccaacggtaccatcatccacgtgaagggcaaacacctgtgcccgtcccctctgttcccgggaccgtccaagcccttctgggtgctcgtggtcgtcggtggcgtgctggcctgttactccttgctcgtgactgtggcattcattatcttttgggtccggtccaagagatctcggctgctgcactccgattacatgaacatgcccccgaggcgcccgggaccgaccagaaagcattatcagccatacgcgccccctcgcgacttcgccgcctaccggtcatgataaaagcttaatgctggagcctcggtagccgttcctcctgcccgctgggcctcccaacgggccctcctcccctccttgcaccggcccttcctggtctttgaataaagtttacctgactcatggtcctttcactttcacatgggatttcccagttatgaaattaataaaaatcagtgatttccacatctgtgtgtgcctgtgccaggctgggtggggaacaggaggccgagatgattccgggaactgtcagaaggaatcaatgatttccacatcctgtctgtcttatgtcttggggggtggggaggccaggaagattccaggaaggtcagagtcaatcaatggtttccacatctctcagtgcctctatctggaggccaggtagggctggccttgggggagggggaggccagaatgactccaagagctacaggaaggggggagggggaaaaaggccagaataattccaggaaccgccaagaagatgacgtcgaggagaagttccccaactttcccgcctctcagcctttgaaagaaagaaaggggagggggcaggccgcgtgcagccgcgagcggtgctgggctccggctccaattccccatctcagtcgttcccaaagtcctcctgtttcatccaagcgtgtaagggtccccgtccttgactccctagtgtcctgctgcccacagtccagtcctgggaaccagcaccgatcacctcccatcgggccaatctcagtcccttcccccctacgtcggggcccacacgctcggtgcgtgcccagttgaaccaggcggctgcggaaaaaaaaaagcggggagaaagtagggcccggctactagcggttttacgggcgcacgtagctcaggcctcaagaccttgggctgggactggctgagcctggcgggaggcggggtccgagtcaccgcctgccgccgcgcccccggtttctataaattgagcccgcagcctcccgcttcgctctctgctcctcctgttcgacagtcagccgcatcttcttttgcgtcgccagggggagcttgcttgttctttttgcagaagctcagaataaacgctcaactttggccgccacc

SEQ ID NO: 228 - protein, 556 aa, Artificial Sequence [sequence omitted]

SEQ ID NO: 229 - protein, 486 aa, Artificial Sequence
  Synthetic
MALPVTALLLPLALLLHAARPDIQMTQTTSSLSASLGDRVTISCRASQDISKYLNWYQQKPDGTVKLLIYHTSRLHSGVPSRFSGSGSGTDYSLTISNLEQEDIATYFCQQGNTLPYTFGGGTKLEITGGGGSGGGGSGGGGSEVKLQESGPGLVAPSQSLSVTCTVSGVSLPDYGVSWIRQPPRKGLEWLGVIWGSETTYYNSALKSRLTIIKDNSKSQVFLKMNSLQTDDTAIYYCAKHYYYGGSYAMDYWGQGTSVTVSSTTTPAPRPPTPAPTIASQPLSLRPEACRPAAGGAVHTRGLDFACDIYIWAPLAGTCGVLLLSLVITLYCKRGRKKLLYIFKQPFMRPVQTTQEEDGCSCRFPEEEEGGCELRVKFSRSADAPAYKQGQNQLYNELNLGRREEYDVLDKRRGRDPEMGGKPRRKNPQEGLYNELQKDKMAEAYSEIGMKGERRRGKGHDGLYQGLSTATKDTYDALHMQALPPR

SEQ ID NO: 230 - protein, 111 aa, Artificial Sequence
  Synthetic
VKFSRSADAPAYKQGQNQLYNELNLGRREEYDVLDKRRGRDPEMGGKPRRKNPQEGLYNELQKDKMAEAYSEIGMKGERRRGKGHDGLYQGLSTATKDTYDALHMQALPPR

SEQ ID NO: 231 - protein, 376 aa, Artificial Sequence
  Synthetic
MASYPCHQHASAFDQAARSRGHSNRRTALRPRRQQEATEVRLEQKMPTLLRVYIDGPHGMGKTTTTQLLVALGSRDDIVYVPEPMTYWQVLGASETIANIYTTQHRLDQGEISAGDAAVVMTSAQITMGMPYAVTDAVLAPHIGGEAGSSHAPPPALTLIFDRHPIAALLCYPAARYLMGSMTPQAVLAFVALIPPTLPGTNIVLGALPEDRHIDRLAKRQRPGERLDLAMLAAIRRVYGLLANTVRYLQGGGSWREDWGQLSGTAVPPQGAEPQSNAGPRPHIGDTLFTLFRAPELLAPNGDLYNVFAWALDVLAKRLRPMHVFILDYDQSPAGCRDALLQLTSGMVQTHVTTPGSIPTICDLARTFAREMGEAN

SEQ ID NO: 232 - protein, 770 aa, Artificial Sequence
  Synthetic
MAQWNQLQQLDTRYLEQLHQLYSDSFPMELRQFLAPWIESQDWAYAASKESHATLVFHNLLGEIDQQYSRFLQESNVLYQHNLRRIKQFLQSRYLEKPMEIARIVARCLWEESRLLQTAATAAQQGGQANHPTAAVVTEKQQMLEQHLQDVRKRVQDLEQKMKVVENLQDDFDFNYKTLKSQGDMQDLNGNNQSVTRQKMQQLEQMLTALDQMRRSIVSELAGLLSAMEYVQKTLTDEELADWKRRQQIACIGGPPNICLDRLENWITSLAESQLQTRQQIKKLEELQQKVSYKGDPIVQHRPMLEERIVELFRNLMKSAFVVERQPCMPMHPDRPLVIKTGVQFTTKVRLLVKFPELNYQLKIKVCIDKDSGDVAALRGSRKFNILGTNTKVMNMEESNNGSLSAEFKHLTLREQRCGNGGRANCDASLIVTEELHLITFETEVYHQGLKIDLETHSLPVVVISNICQMPNAWASILWYNMLTNNPKNVNFFTKPPIGTWDQVAEVLSWQFSSTTKRGLSIEQLTTLAEKLLGPGVNYSGCQITWAKFCKENMAGKGFSFWVWLDNIIDLVKKYILALWNEGYIMGFISKERERAILSTKPPGTFLLRFSESSKEGGVTFTWVEKDISGKTQIQSVEPYTKQQLNNMSFAEIIMGYKIMDATNILVSPLVYLYPDIPKEEAFGKYCRPESQEHPEADPGSAAPYLKTKFICVTPTTCSNTIDLPMSPRTLDSLMQFGNNGEGAEPSAGGQFESLTFDMELTSECATSPM

SEQ ID NO: 233 - protein, 220 aa, Artificial Sequence
  Synthetic
MLRLLLALNLFPSIQVTGNKILVKQSPMLVAYDNAVNLSCKYSYNLFSREFRASLHKGLDSAVEVCVVYGNYSQQLQVYSKTGFNCDGKLGNESVTFYLQNLYVNQTDIYFCKIEVMYPPPYLDNEKSNGTIIHVKGKHLCPSPLFPGPSKPFWVLVVVGGVLACYSLLVTVAFIIFWVRSKRSRLLHSDYMNMTPRRPGPTRKHYQPYAPPRDFAAYRS

SEQ ID NO: 234 - protein, 193 aa, Artificial Sequence
  Synthetic
MAAIRKKLVIVGDGACGKTCLLIVFSKDQFPEVYVPTVFENYVADIEVDGKQVELALWDTAGQEDYDRLRPLSYPDTDVILMCFSIDSPDSLENIPEKWTPEVKHFCPNVPIILVGNKKDLRNDEHTRRELAKMKQEPVKPEEGRDMANRIGAFGYMECSAKTKDGVREVFEMATRAALQARRGKKKSGCLVL

SEQ ID NO: 235 - protein, 1290 aa, Artificial Sequence
  Synthetic
MAGAASPCANGCGPGAPSDAEVLHLCRSLEVGTVMTLFYSKKSQRPERKTFQVKLETRQITWSRGADKIEGAIDIREIKEIRPGKTSRDFDRYQEDPAFRPDQSHCFVILYGMEFRLKTLSLQATSEDEVNMWIKGLTWLMEDTLQAPTPLQIERWLRKQFYSVDRNREDRISAKDLKNMLSQVNYRVPNMRFLRERLTDLEQRSGDITYGQFAQLYRSLMYSAQKTMDLPFLEASTLRAGERPELCRVSLPEFQQFLLDYQGELWAVDRLQVQEFMLSFLRDPLREIEEPYFFLDEFVTFLFSKENSVWNSQLDAVCPDTMNNPLSHYWISSSHNTYLTGDQFSSESSLEAYARCLRMGCRCIELDCWDGPDGMPVIYHGHTLTTKIKFSDVLHTIKEHAFVASEYPVILSIEDHCSIAQQRNMAQYFKKVLGDTLLTKPVEISADGLPSPNQLKRKILIKHKKLAEGSAYEEVPTSMMYSENDISNSIKNGILYLEDPVNHEWYPHYFVLTSSKIYYSEETSSDQGNEDEEEPKEVSSSTELHSNEKWFHGKLGAGRDGRHIAERLLTEYCIETGAPDGSFLVRESETFVGDYTLSFWRNGKVQHCRIHSRQDAGTPKFFLTDNLVFDSLYDLITHYQQVPLRCNEFEMRLSEPVPQTNAHESKEWYHASLTRAQAEHMLMRVPRDGAFLVRKRNEPNSYAISFRAEGKIKHCRVQQEGQTVMLGNSEFDSLVDLISYYEKHPLYRKMKLRYPINEEALEKIGTAEPDYGALYEGRNPGFYVEANPMPTFKCAVKALFDYKAQREDELTFIKSAIIQNVEKQEGGWWRGDYGGKKQLWFPSNYVEEMVNPVALEPEREHLDENSPLGDLLRGVLDVPACQIAIRPEGKNNRLFVFSISMASVAHWSLDVAADSQEELQDWVKKIREVAQTADARLTEGKIMERRKKIALELSELVVYCRPVPFDEEKIGTERACYRDMSSFPETKAEKYVNKAKGKKFLQYNRLQLSRIYPKGQRLDSSNYDPLPMWICGSQLVALNFQTPDKPMQMNQALFMTGRHCGYVLQPSTMRDEAFDPFDKSSLRGLEPCAISIEVLGARHLPKNGRGIVCPFVEIEVAGAEYDSTKQKTEFVVDNGLNPVWPAKPFHFQISNPEFAFLRFVVYEEDMFSDQNFLAQATFPVKGLKTGYRAVPLKNNYSEDLELASLLIKIDIFPAKENGDLSPFSGTSLRERGSDASGQLFHGRAREGSFESRYQQPFEDFRISQEHLADHFDSRERRAPRRTRVNGDNRL

SEQ ID NO: 236 - protein, 787 aa, Artificial Sequence
  Synthetic
MAVWIQAQQLQGEALHQMQALYGQHFPIEVRHYLSQWIESQAWDSVDLDNPQENIKATQLLEGLVQELQKKAEHQVGEDGFLLKIKLGHYATQLQNTYDRCPMELVRCIRHILYNEQRLVREANNGSSPAGSLADAMSQKHLQINQTFEELRLVTQDTENELKKLQQTQEYFIIQYQESLRIQAQFGPLAQLSPQERLSRETALQQKQVSLEAWLQREAQTLQQYRVELAEKHQKTLQLLRKQQTIILDDELIQWKRRQQLAGNGGPPEGSLDVLQSWCEKLAEIIWQNRQQIRRAEHLCQQLPIPGPVEEMLAEVNATITDIISALVTSTFIIEKQPPQVLKTQTKFAATVRLLVGGKLNVHMNPPQVKATIISEQQAKSLLKNENTRNDYSGEILNNCCVMEYHQATGTLSAHFRNMSLKRIKRSDRRGAESVTEEKFTILFESQFSVGGNELVFQVKTLSLPVVVIVHGSQDNNATATVLWDNAFAEPGRVPFAVPDKVLWPQLCEALNMKFKAEVQSNRGLTKENLVFLAQKLFNNSSSHLEDYSGLSVSWSQFNRENLPGRNYTFWQWFDGVMEVLKKHLKPHWNDGAILGFVNKQQAHDLLINKPDGTFLLRFSDSEIGGITIAWKFDSQERMFWNLMPFTTRDFSIRSLADRLGDLNYLIYVFPDRPKDEVYSKYYTPVPCESATAKAVDGYVKPQIKQVVPEFVNASADAGGGSATYMDQAPSPAVCPQAHYNMYPQNPDSVLDTDGDFDLEDTMDVARRVEELLGRPMDSQWIPHAQS

SEQ ID NO: 237 - protein, 142 aa, Artificial Sequence
  Synthetic
MGAPTLPPAWQPFLKDHRISTFKNWPFLEGCACTPERMAEAGFIHCPTENEPDLAQCFFCFKELEGWEPDDDPIEEHKKHSSGCAFLSVKKQFEELTLGEFLKLDRERAKNKIAKETNNKKKEFEETAKKVRRAIEQLAAMD

SEQ ID NO: 238 - protein, 233 aa, Artificial Sequence
  Synthetic
MSQSNRELVVDFLSYKLSQKGYSWSQFSDVEENRTEAPEGTESEMETPSAINGNPSWHLADSPAVNGATGHSSSLDAREVIPMAAVKQALREAGDEFELRYRRAFSDLTSQLHITPGTAYQSFEQVVNELFRDGVNWGRIVAFFSFGGALCVESVDKEMQVLVSRIAAWMATYLNDHLEPWIQENGGWDTFVELYGNNAAAESRKGQERFNRWFLTGMTVAGVVLLGSLFSRK

SEQ ID NO: 239 - protein, 295 aa, Artificial Sequence
  Synthetic
MEHQLLCCEVETIRRAYPDANLLNDRVLRAMLKAEETCAPSVSYFKCVQKEVLPSMRKIVATWMLEVCEEQKCEEEVFPLAMNYLDRFLSLEPVKKSRLQLLGATCMFVASKMKETIPLTAEKLCIYTDNSIRPEELLQMELLLVNKLKWNLAAMTPHDFIEHFLSKMPEAEENKQIIRKHAQTFVALCATDVKFISNPPSMVAAGSVVAAVQGLNLRSPNNFLSYYRLTRFLSRVIKCDPDCLRACQEQIEALLESSLRQAQQNMDPKAAEEEEEEEEEVDLACTPTDVRDVDI

SEQ ID NO: 240 - protein, 277 aa, Artificial Sequence
  Synthetic
MENTENSVDSKSIKNLEPKIIHGSESMDSGISLDNSYKMDYPEMGLCIIINNKNFHKSTGMTSRSGTDVDAANLRETFRNLKYEVRNKNDLTREEIVELMRDVSKEDHSKRSSFVCVLLSHGEEGIIFGTNGPVDLKKITNFFRGDRCRSLTGKPKLFIIQACRGTELDCGIETDSGVDDDMACHKIPVEADFLYAYSTAPGYYSWRNSKDGSWFIQSLCAMLKQYADKLEFMHILTRVNRKVATEFESFSFDATFHAKKQIPCIVSMLTKELYFYH

SEQ ID NO: 241 - protein, 303 aa, Artificial Sequence
  Synthetic
MADDQGCIEEQGVEDSANEDSVDAKPDRSSFVPSLFSKKKKNVTMRSIKTTRDRVPTYQYNMNFEKLGKCIIINNKNFDKVTGMGVRNGTDKDAEALFKCFRSLGFDVIVYNDCSCAKMQDLLKKASEEDHTNAACFACILLSHGEENVIYGKDGVTPIKDLTAHFRGDRCKTLLEKPKLFFIQACRGTELDDGIQADSGPINDTDANPRYKIPVEADFLFAYSTVPGYYSWRSPGRGSWFVQALCSILEEHGKDLEIMQILTRVNDRVARHFESQSDDPHFHEKKQIPCVVSMLTKELYFSQ

SEQ ID NO: 242 - protein, 479 aa, Artificial Sequence
  Synthetic
MDFSRNLYDIGEQLDSEDLASLKFLSLDYIPQRKQEPIKDALMLFQRLQEKRMLEESNLSFLKELLFRINRLDLLITYLNTRKEEMERELQTPGRAQISAYRVMLYQISEEVSRSELRSFKFLLQEEISKCKLDDDMNLLDIFIEMEKRVILGEGKLDILKRVCAQINKSLLKIINDYEEFSKERSSSLEGSPDEFSNGEELCGVMTISDSPREQDSESQTLDKVYQMKSKPRGYCLIINNHNFAKAREKVPKLHSIRDRNGTHLDAGALTTTFEELHFEIKPHDDCTVEQIYEILKIYQLMDHSNMDCFICCILSHGDKGIIYGTDGQEAPIYELTSQFTGLKCPSLAGKPKVFFIQACQGDNYQKGIPVETDSEEQPYLEMDLSSPQTRYIPDEADFLLGMATVNNCVSYRNPAEGTWYIQSLCQSLRERCPRGDDILTILTEVNYEVSNKDDKKNMGKQMPQPTFTLRKKLVFPSD

SEQ ID NO: 243 - protein, 416 aa, Artificial Sequence
  Synthetic
MDEADRRLLRRCRLRLVEELQVDQLWDALLSRELFRPHMIEDIQRAGSGSRRDQARQLIIDLETRGSQALPLFISCLEDTGQDMLASFLRTNRQAAKLSKPTLENLTPVVLRPEIRKPEVLRPETPRPVDIGSGGFGDVGALESLRGNADLAYILSMEPCGHCLIINNVNFCRESGLRTRTGSNIDCEKLRRRFSSLHFMVEVKGDLTAKKMVLALLELAQQDHGALDCCVVVILSHGCQASHLQFPGAVYGTDGCPVSVEKIVNIFNGTSCPSLGGKPKLFFIQACGGEQKDHGFEVASTSPEDESPGSNPEPDATPFQEGLRTFDQLDAISSLPTPSDIFVSYSTFPGFVSWRDPKSGSWYVETLDDIFEQWAHSEDLQSLLLRVANAVSVKGIYKQMPGCFNFLRKKLFFKTS

SEQ ID NO: 244 - protein, 521 aa, Artificial Sequence
  Synthetic
MKSQGQHWYSSSDKNCKVSFREKLLIIDSNLGVQDVENLKFLCIGLVPNKKLEKSSSASDVFEHLLAEDLLSEEDPFFLAELLYIIRQKKLLQHLNCTKEEVERLLPTRQRVSLFRNLLYELSEGIDSENLKDMIFLLKDSLPKTEMTSLSFLAFLEKQGKIDEDNLTCLEDLCKTVVPKLLRNIEKYKREKAIQIVTPPVDKEAESYQGEEELVSQTDVKTFLEALPQESWQNKHAGSNGNRATNGAPSLVSRGMQGASANTLNSETSTKRAAVYRMNRNHRGLCVIVNNHSFTSLKDRQGTHKDAEILSHVFQWLGFTVHIHNNVTKVEMEMVLQKQKCNPAHADGDCFVFCILTHGRFGAVYSSDEALIPIREIMSHFTALQCPRLAEKPKLFFIQACQGEEIQPSVSIEADALNPEQAPTSLQDSIPAEADFLLGLATVPGYVSFRHVEEGSWYIQSLCNHLKKLVPRMLKFLEKTMEIRGRKRTVWGAKQISATSLPTAISAQTPRPPMRRWSSVS

SEQ ID NO: 245 - protein, 480 aa, Artificial Sequence
  Synthetic
MSAEVIHQVEEALDTDEKEMLLFLCRDVAIDVVPPNVRDLLDILRERGKLSVGDLAELLYRVRRFDLLKRILKMDRKAVETHLLRNPHLVSDYRVLMAEIGEDLDKSDVSSLIFLMKDYMGRGKISKEKSFLDLVVELEKLNLVAPDQLDLLEKCLKNIHRIDLKTKIQKYKQSVQGAGTSYRNVLQAAIQKSLKDPSNNFRLHNGRSKEQRLKEQLGAQQEPVKKSIQESEAFLPQSIPEERYKMKSKPLGICLIIDCIGNETELLRDTFTSLGYEVQKFLHLSMHGISQILGQFACMPEHRDYDSFVCVLVSRGGSQSVYGVDQTHSGLPLHHIRRMFMGDSCPYLAGKPKMFFIQNYVVSEGQLEDSSLLEVDGPAMKNVEFKAQKRGLCTVHREADFFWSLCTADMSLLEQSHSSPSLYLQCLSQKLRQERKRPLLDLHIELNGYMYDWNSRVSAKEKYYVWLQHTLRKKLILSYT

SEQ ID NO: 246 - protein, 770 aa, Artificial Sequence
  Synthetic
MAQWNQLQQLDTRYLEQLHQLYSDSFPMELRQFLAPWIESQDWAYAASKESHATLVFHNLLGEIDQQYSRFLQESNVLYQHNLRRIKQFLQSRYLEKPMEIARIVARCLWEESRLLQTAATAAQQGGQANHPTAAVVTEKQQMLEQHLQDVRKRVQDLEQKMKVVENLQDDFDFNYKTLKSQGDMQDLNGNNQSVTRQKMQQLEQMLTALDQMRRSIVSELAGLLSAMEYVQKTLTDEELADWKRRQQIACIGGPPNICLDRLENWITSLAESQLQTRQQIKKLEELQQKVSYKGDPIVQHRPMLEERIVELFRNLMKSAFVVERQPCMPMHPDRPLVIKTGVQFTTKVRLLVKFPELNYQLKIKVCIDKDSGDVAALRGSRKFNILGTNTKVMNMEESNNGSLSAEFKHLTLREQRCGNGGRANCDASLIVTEELHLITFETEVYHQGLKIDLETHSLPVVVISNICQMPNAWASILWYNMLTNNPKNVNFFTKPPIGTWDQVAEVLSWQFSSTTKRGLSIEQLTTLAEKLLGPGVNYSGCQITWAKFCKENMAGKGFSFWVWLDNIIDLVKKYILALWNEGYIMGFISKERERAILSTKPPGTFLLRFSESSKEGGVTFTWVEKDISGKTQIQSVEPFTKQQLNNMSFAEIIMGYKIMDATNILVSPLVYLYPDIPKEEAFGKYCRPESQEHPEADPGSAAPYLKTKFICVTPTTCSNTIDLPMSPRTLDSLMQFGNNGEGAEPSAGGQFESLTFDMELTSECATSPM

SEQ ID NO: 247 - protein, 770 aa, Artificial Sequence
  Synthetic
MAQWNQLQQLDTRYLEQLHQLYSDSFPMELRQFLAPWIESQDWAYAASKESHATLVFHNLLGEIDQQYSRFLQESNVLYQHNLRRIKQFLQSRYLEKPMEIARIVARCLWEESRLLQTAATAAQQGGQANHPTAAVVTEKQQMLEQHLQDVRKRVQDLEQKMKVVENLQDDFDFNYKTLKSQGDMQDLNGNNQSVTRQKMQQLEQMLTALDQMRRSIVSELAGLLSAMEYVQKTLTDEELADWKRRQQIACIGGPPNICLDRLENWITSLAESQLQTRQQIKKLEELQQKVSYKGDPIVQHRPMLEERIVELFRNLMKSAFVVERQPCMPMHPDRPLVIKTGVQFTTKVRLLVKFPELNYQLKIKVCIDKDSGDVAALRGSRKFNILGTNTKVMNMEESNNGSLSAEFKHLTLREQRCGNGGRANCDASLIVTEELHLITFETEVYHQGLKIDLETHSLPVVVISNICQMPNAWASILWYNMLTNNPKNVNFFTKPPIGTWDQVAEVLSWQFSSTTKRGLSIEQLTTLAEKLLGPGVNYSGCQITWAKFCKENMAGKGFSFWVWLDNIIDLVKKYILALWNEGYIMGFISKERERAILSTKPPGTFLLRFSESSKEGGVTFTWVEKDISGKTQIQSVEPYTKQQLNNMSFAEIIMGYKIMYATNILVSPLVYLYPDIPKEEAFGKYCRPESQEHPEADPGSAAPYLKTKFICVTPTTCSNTIDLPMSPRTLDSLMQFGNNGEGAEPSAGGQFESLTFDMELTSECATSPM

SEQ ID NO: 248 - protein, 770 aa, Artificial Sequence
  Synthetic
MAQWNQLQQLDTRYLEQLHQLYSDSFPMELRQFLAPWIESQDWAYAASKESHATLVFHNLLGEIDQQYSRFLQESNVLYQHNLRRIKQFLQSRYLEKPMEIARIVARCLWEESRLLQTAATAAQQGGQANHPTAAVVTEKQQMLEQHLQDVRKRVQDLEQKMKVVENLQDDFDFNYKTLKSQGDMQDLNGNNQSVTRQKMQQLEQMLTALDQMRRSIVSELAGLLSAMEYVQKTLTDEELADWKRRQQIACIGGPPNICLDRLENWITSLAESQLQTRQQIKKLEELQQKVSYKGDPIVQHRPMLEERIVELFRNLMKSAFVVERQPCMPMHPDRPLVIKTGVQFTTKVRLLVKFPELNYQLKIKVCIDKDSGDVAALRGSRKFNILGTNTKVMNMEESNNGSLSAEFKHLTLREQRCGNGGRANCDASLIVTEELHLITFETEVYHQGLKIDLETHSLPVVVISNICQMPNAWASILWYNMLTNNPKNVNFFTKPPIGTWDQVAEVLSWQFSSTTKRGLSIEQLTTLAEKLLGPGVNYSGCQITWAKFCKENMAGKGFSFWVWLDNIIDLVKKYILALWNEGYIMGFISKERERAILSTKPPGTFLLRFSESRKEGGVTFTWVEKDISGKTQIQSVEPFTKQQLNNMSFAEIIMGYKIMDATNILVSPLVYLYPDIPKEEAFGKYCRPESQEHPEADPGSAAPYLKTKFICVTPTTCSNTIDLPMSPRTLDSLMQFGNNGEGAEPSAGGQFESLTFDMELTSECATSPM

SEQ ID NO: 249 - protein, 770 aa, Artificial Sequence
  Synthetic
MAQWNQLQQLDTRYLEQLHQLYSDSFPMELRQFLAPWIESQDWAYAASKESHATLVFHNLLGEIDQQYSRFLQESNVLYQHNLRRIKQFLQSRYLEKPMEIARIVARCLWEESRLLQTAATAAQQGGQANHPTAAVVTEKQQMLEQHLQDVRKRVQDLEQKMKVVENLQDDFDFNYKTLKSQGDMQDLNGNNQSVTRQKMQQLEQMLTALDQMRRSIVSELAGLLSAMEYVQKTLTDEELADWKRRQQIACIGGPPNICLDRLENWITSLAESQLQTRQQIKKLEELQQKVSYKGDPIVQHRPMLEERIVELFRNLMKSAFVVERQPCMPMHPDRPLVIKTGVQFTTKVRLLVKFPELNYQLKIKVCIDKDSGDVAALRGSRKFNILGTNTKVMNMEESNNGSLSAEFKHLTLREQRCGNGGRANCDASLIVTEELHLITFETEVYHQGLKIDLETHSLPVVVISNICQMPNAWASILWYNMLTNNPKNVNFFTKPPIGTWDQVAEVLSWQFSSTTKRGLSIEQLTTLAEKLLGPGVNYSGCQITWAKFCKENMAGKGFSFWVWLDNIIDLVKKYILALWNEGYIMGFISKERERAILSTKPPGTFLLRFSESSKKGGVTFTWVEKDISGKTQIQSVEPFTKQQLNNMSFAEIIMGYKIMDATNILVSPLVYLYPDIPKEEAFGKYCRPESQEHPEADPGSAAPYLKTKFICVTPTTCSNTIDLPMSPRTLDSLMQFGNNGEGAEPSAGGQFESLTFDMELTSECATSPM

SEQ ID NO: 250 - protein, 770 aa, Artificial Sequence
  Synthetic
MAQWNQLQQLDTRYLEQLHQLYSDSFPMELRQFLAPWIESQDWAYAASKESHATLVFHNLLGEIDQQYSRFLQESNVLYQHNLRRIKQFLQSRYLEKPMEIARIVARCLWEESRLLQTAATAAQQGGQANHPTAAVVTEKQQMLEQHLQDVRKRVQDLEQKMKVVENLQDDFDFNYKTLKSQGDMQDLNGNNQSVTRQKMQQLEQMLTALDQMRRSIVSELAGLLSAMEYVQKTLTDEELADWKRRQQIACIGGPPNICLDRLENWITSLAESQLQTRQQIKKLEELQQKVSYKGDPIVQHRPMLEERIVELFRNLMKSAFVVERQPCMPMHPDRPLVIKTGVQFTTKVRLLVKFPELNYQLKIKVCIDKDSGDVAALRGSRKFNILGTNTKVMNMEESNNGSLSAEFKHLTLREQRCGNGGRANCDASLIVTEELHLITFETEVYHQGLKIDLETHSLPVVVISNICQMPNAWASILWYNMLTNNPKNVNFFTKPPIGTWDQVAEVLSWQFSSTTKRGLSIEQLTTLAEKLLGPGVNYSGCQITWAKFCKENMAGKGFSFWVWLDNIIDLVKKYILALWNEGYIMGFISKERERAILSTKPPGTFLLRFSESSKEGGVTFTWVEKDISGKTQIQSVEPFTKQQLNIMSFAEIIMGYKIMDATNILVSPLVYLYPDIPKEEAFGKYCRPESQEHPEADPGSAAPYLKTKFICVTPTTCSNTIDLPMSPRTLDSLMQFGNNGEGAEPSAGGQFESLTFDMELTSECATSPM

SEQ ID NO: 251 - protein, 220 aa, Artificial Sequence
  Synthetic
MLRLLLALNLFPSIQVTGNKILVKQSPMLVAYDNAVNLSCKYSYNLFSREFRASLHKGLDSAVEVCVVYGNYSQQLQVYSKTGFNCDGKLGNESVTFYLQNLYVNQTDIYFCKIEVMYPPPYLENEKSNGTIIHVKGKHLCPSPLFPGPSKPFWVLVVVGGVLACYSLLVTVAFIIFWVRSKRSRLLHSDYMNMPPRRPGPTRKHYQPYAPPRDFAAYRS

SEQ ID NO: 252 - protein, 193 aa, Artificial Sequence
  Synthetic
MAAIRKKLVIVGDGACVKTCLLIVFSKDQFPEVYVPTVFENYVADIEVDGKQVELALWDTAGQEDYDRLRPLSYPDTDVILMCFSIDSPDSLENIPEKWTPEVKHFCPNVPIILVGNKKDLRNDEHTRRELAKMKQEPVKPEEGRDMANRIGAFGYMECSAKTKDGVREVFEMATRAALQARRGKKKSGCLVL

SEQ ID NO: 253 - protein, 193 aa, Artificial Sequence
  Synthetic
MAAIRKKLVIVGDGACGNTCLLIVFSKDQFPEVYVPTVFENYVADIEVDGKQVELALWDTAGQEDYDRLRPLSYPDTDVILMCFSIDSPDSLENIPEKWTPEVKHFCPNVPIILVGNKKDLRNDEHTRRELAKMKQEPVKPEEGRDMANRIGAFGYMECSAKTKDGVREVFEMATRAALQARRGKKKSGCLVL

SEQ ID NO: 254 - protein, 1290 aa, Artificial Sequence
  Synthetic
MAGAASPCANGCGPGAPSDAEVLHLCRSLEVGTVMTLFYSKKSQRPERKTFQVKLETRQITWSRGADKIEGAIDIREIKEIRPGKTSRDFDRYQEDPAFRPDQSHCFVILYGMEFRLKTLSLQATSEDEVNMWIKGLTWLMEDTLQAPTPLQIERWLRKQFYSVDRNREDRISAKDLKNMLSQVNYRVPNMRFLRERLTDLEQRSGDITYGQFAQLYRSLMYSAQKTMDLPFLEASTLRAGERPELCRVSLPEFQQFLLDYQGELWAVDRLQVQEFMLSFLRDPLREIEEPYFFLDEFVTFLFSKENSVWNSQLDAVCPDTMNNPLSHYWISSSHNTYLTGDQFFSESSLEAYARCLRMGCRCIELDCWDGPDGMPVIYHGHTLTTKIKFSDVLHTIKEHAFVASEYPVILSIEDHCSIAQQRNMAQYFKKVLGDTLLTKPVEISADGLPSPNQLKRKILIKHKKLAEGSAYEEVPTSMMYSENDISNSIKNGILYLEDPVNHEWYPHYFVLTSSKIYYSEETSSDQGNEDEEEPKEVSSSTELHSNEKWFHGKLGAGRDGRHIAERLLTEYCIETGAPDGSFLVRESETFVGDYTLSFWRNGKVQHCRIHSRQDAGTPKFFLTDNLVFDSLYDLITHYQQVPLRCNEFEMRLSEPVPQTNAHESKEWYHASLTRAQAEHMLMRVPRDGAFLVRKRNEPNSYAISFRAEGKIKHCRVQQEGQTVMLGNSEFDSLVDLISYYEKHPLYRKMKLRYPINEEALEKIGTAEPDYGALYEGRNPGFYVEANPMPTFKCAVKALFDYKAQREDELTFIKSAIIQNVEKQEGGWWRGDYGGKKQLWFPSNYVEEMVNPVALEPEREHLDENSPLGDLLRGVLDVPACQIAIRPEGKNNRLFVFSISMASVAHWSLDVAADSQEELQDWVKKIREVAQTADARLTEGKIMERRKKIALELSELVVYCRPVPFDEEKIGTERACYRDMSSFPETKAEKYVNKAKGKKFLQYNRLQLSRIYPKGQRLDSSNYDPLPMWICGSQLVALNFQTPDKPMQMNQALFMTGRHCGYVLQPSTMRDEAFDPFDKSSLRGLEPCAISIEVLGARHLPKNGRGIVCPFVEIEVAGAEYDSTKQKTEFVVDNGLNPVWPAKPFHFQISNPEFAFLRFVVYEEDMFSDQNFLAQATFPVKGLKTGYRAVPLKNNYSEDLELASLLIKIDIFPAKENGDLSPFSGTSLRERGSDASGQLFHGRAREGSFESRYQQPFEDFRISQEHLADHFDSRERRAPRRTRVNGDNRL

SEQ ID NO: 255 - protein, 787 aa, Artificial Sequence
  Synthetic
MAVWIQAQQLQGEALHQMQALYGQHFPIEVRHYLSQWIESQAWDSVDLDNPQENIKATQLLEGLVQELQKKAEHQVGEDGFLLKIKLGHYATQLQNTYDRCPMELVRCIRHILYNEQRLVREANNGSSPAGSLADAMSQKHLQINQTFEELRLVTQDTENELKKLQQTQEYFIIQYQESLRIQAQFGPLAQLSPQERLSRETALQQKQVSLEAWLQREAQTLQQYRVELAEKHQKTLQLLRKQQTIILDDELIQWKRRQQLAGNGGPPEGSLDVLQSWCEKLAEIIWQNRQQIRRAEHLCQQLPIPGPVEEMLAEVNATITDIISALVTSTFIIEKQPPQVLKTQTKFAATVRLLVGGKLNVHMNPPQVKATIISEQQAKSLLKNENTRNDYSGEILNNCCVMEYHQATGTLSAHFRNMSLKRIKRSDRRGAESVTEEKFTILFESQFSVGGNELVFQVKTLSLPVVVIVHGSQDNNATATVLWDNAFAEPGRVPFAVPDKVLWPQLCEALNMKFKAEVQSNRGLTKENLVFLAQKLFNNSSSHLEDYSGLSVSWSQFNRENLPGRNYTFWQWFDGVMEVLKKHLKPHWNDGAILGFVNKQQAHDLLINKPDGTFLLRFSDSEIGGITIAWKFDSQERMFWHLMPFTTRDFSIRSLADRLGDLNYLIYVFPDRPKDEVYSKYYTPVPCESATAKAVDGYVKPQIKQVVPEFVNASADAGGGSATYMDQAPSPAVCPQAHYNMYPQNPDSVLDTDGDFDLEDTMDVARRVEELLGRPMDSQWIPHAQS

SEQ ID NO: 256 - protein, 295 aa, Artificial Sequence
  Synthetic
MEHQLLCCEVETIRRAYPDANLLNDRVLRAMLKAEETCAPLVSYFKCVQKEVLPSMRKIVATWMLEVCEEQKCEEEVFPLAMNYLDRFLSLEPVKKSRLQLLGATCMFVASKMKETIPLTAEKLCIYTDNSIRPEELLQMELLLVNKLKWNLAAMTPHDFIEHFLSKMPEAEENKQIIRKHAQTFVALCATDVKFISNPPSMVAAGSVVAAVQGLNLRSPNNFLSYYRLTRFLSRVIKCDPDCLRACQEQIEALLESSLRQAQQNMDPKAAEEEEEEEEEVDLACTPTDVRDVDI

SEQ ID NO: 257 - protein, 1068 aa, Artificial Sequence
  Synthetic
MPPRPSSGELWGIHLMPPRILVECLLPNGMIVTLECLREATLITIKHELFKEARKYPLHQLLQDESSYIFVSVTQEAEREEFFDETRRLCDLRLFQPFLKVIEPVGNREEKILNREIGFAIGMPVCEFDMVKDPEVQDFRRNILNVCKEAVDLRDLNSPHSRAMYVYPPNVESSPELPKHIYNKLDKGQIIVVIWVIVSPNNDKQKYTLKINHDCVPEQVIAEAIRKKTRSMLLSSEQLKLCVLEYQGKYILKVCGCDEYFLEKYPLSQYKYIRSCIMLGRMPNLMLMAKESLYSQLPMDCFTMPSYSRRISTATPYMNGETSTKSLWVINSALRIKILCATYVNVNIRDIDKIYVRTGIYHGGEPLCDNVNTQRVPCSNPRWNEWLNYDIYIPDLPRAARLCLSICSVKGRKGAKEEHCPLAWGNINLFDYTDTLVSGKMALNLWPVPHGLEDLLNPIGVTGSNPNKETPCLELEFDWFSSVVKFPDMSVIEEHANWSVSREAGFSYSHAGLSNRLARDNELRENDKEQLKAISTRDPLSEITEQEKDFLWSHRHYCVTIPEILPKLLLSVKWNSRDEVAQMYCLVKDWPPIKPEQAMELLDCNYPDPMVRGFAVRCLEKYLTDDKLSQYLIQLVQVLKYEQYLDNLLVRFLLKKALTNQRIGHFFFWHLKSEMHNKTVSQRFGLLLESYCRACGMYLKHLNRQVEAMEKLINLTDILKQEKKDETQKVQMKFLVEQMRRPDFMDALQGFLSPLNPAHQLGNLRLEECRIMSSAKRPLWLNWENPDIMSELLFQNNEIIFKNGDDLRQDMLTLQIIRIMENIWQNQGLDLRMLPYGCLSIGDCVGLIEVVRNSHTIMQIQCKGGLKGALQFNSHTLHQWLKDKNKGEIYDAAIDLFTRSCAGYCVATFILGIGDRHNSNIMVKDDGQLFHIDFGHFLDHKKKKFGYKRERVPFVLTQDFLIVISKGAQECTKTREFERFQEMCYKAYLAIRQHANLFINPFSMMLGSGMPELQSFDDIAYIRKTLALDKTEQEALEYFMKQMNDAHHGGWTTKMDWIFHTIKQHALN

SEQ ID NO: 258 - protein, 15 aa, Artificial Sequence
  Synthetic
MTAIIKEIVSRNKRR

SEQ ID NO: 259 - protein, 20 aa, Artificial Sequence
  Synthetic
MTVEEPSNPEASSSTSVTPD

SEQ ID NO: 260 - protein, 526 aa, Artificial Sequence
  Synthetic
MGSSKSKPKDPSQRRCSLEPPDSTHHGGFPASQTPNKTAAPDTHRTPSRSFGTVATEPKLFGGFNTSDTVTSPQRAGALAGGVTTFVALYDYESRTETDLSFKKGERLQIVNNTEGDWWLAHSLTTGQTGYIPSNYVAPSDSIQAEEWYFGKITRRESERLLLNPENPRGTFLVRESETTKGAYCLSVSDFDNAKGLNVKHYKIRKLDSGGFYITSRTQFSSLQQLVAYYSKHADGLCHRLTNVCPTSKPQTQGLAKDAWEIPRESLRLEVKLGQGCFGEVWMGTWNGTTRVAIKTLKPGTMSPEAFLQEAQVMKKLRHEKLVQLYAVVSEEPIYIVTEYMSKGSLLDFLKGEMGKYLRLPQLVDMAAQIASGMAYVERMNYVHRDLRAANILVGENLVCKVADFGLARLIEDNEYTARQGAKFPIKWTAPEAALYGRFTIKSDVWSFGILLTELTTKGRVPYPGMGNGEVLDRVERGYRMPCPPECPESLHDLMCQCWRRDPEERPTFEYLQAQLLPACVLEVAE

SEQ ID NO: 261 - protein, 277 aa, Artificial Sequence
  Synthetic
MENTENSVDSKSIKNLEPKIIHGSESMDSGISLDNSYKMDYPEMGLCIIINNKNFHKSTGMTSRSGTDVDAANLRETFRNLKYEVRNKNDLTREEIVELMRDVSKEDHSKRSSFVCVLLSHGEEGIIFGTNGPVDLKKITNFFRGDRCRSLTGKPKLFIIQAARGTELDCGIETDSGVDDDMACHKIPVEADFLYAYSTAPGYYSWRNSKDGSWFIQSLCAMLKQYADKLEFMHILTRVNRKVATEFESFSFDATFHAKKQIPCIVSMLTKELYFYH

SEQ ID NO: 262 - protein, 303 aa, Artificial Sequence
  Synthetic
MADDQGCIEEQGVEDSANEDSVDAKPDRSSFVPSLFSKKKKNVTMRSIKTTRDRVPTYQYNMNFEKLGKCIIINNKNFDKVTGMGVRNGTDKDAEALFKCFRSLGFDVIVYNDCSCAKMQDLLKKASEEDHTNAACFACILLSHGEENVIYGKDGVTPIKDLTAHFRGDRCKTLLEKPKLFFIQAARGTELDDGIQADSGPINDTDANPRYKIPVEADFLFAYSTVPGYYSWRSPGRGSWFVQALCSILEEHGKDLEIMQILTRVNDRVARHFESQSDDPHFHEKKQIPCVVSMLTKELYFSQ

SEQ ID NO: 263 - protein, 479 aa, Artificial Sequence
  Synthetic
MDFSRNLYDIGEQLDSEDLASLKFLSLDYIPQRKQEPIKDALMLFQRLQEKRMLEESNLSFLKELLFRINRLALLITYLNTRKEEMERELQTPGRAQISAYRVMLYQISEEVSRSELRSFKFLLQEEISKCKLDDDMNLLDIFIEMEKRVILGEGKLDILKRVCAQINKSLLKIINDYEEFSKERSSSLEGSPDEFSNGEELCGVMTISDSPREQDSESQTLDKVYQMKSKPRGYCLIINNHNFAKAREKVPKLHSIRDRNGTHLDAGALTTTFEELHFEIKPHDDCTVEQIYEILKIYQLMDHSNMDCFICCILSHGDKGIIYGTDGQEAPIYELTSQFTGLKCPSLAGKPKVFFIQAAQGDNYQKGIPVETDSEEQPYLEMDLSSPQTRYIPDEADFLLGMATVNNCVSYRNPAEGTWYIQSLCQSLRERCPRGDDILTILTEVNYEVSNKDDKKNMGKQMPQPTFTLRKKLVFPSD

SEQ ID NO: 264 - protein, 276 aa, Artificial Sequence
  Synthetic
MDFSRNLYDIGEQLDSEDLASLKFLSLDYIPQRKQEPIKDALMLFQRLQEKRMLEESNLSFLKELLFRINRLDLLITYLNTRKEEMERELQTPGRAQISAYRVMLYQISEEVSRSELRSFKFLLQEEISKCKLDDDMNLLDIFIEMEKRVILGEGKLDILKRVCAQINKSLLKIINDYEEFSKERSSSLEGSPDEFSNGEELCGVMTISDSPREQDSESQTLDKVYQMKSKPRGYCLIINNHNFAKAREKVPKLHSIRDRNGTHLDAGTVEPKREK

SEQ ID NO: 265 - protein, 416 aa, Artificial Sequence
  Synthetic
MDEADRRLLRRCRLRLVEELQVDQLWDALLSRELFRPHMIEDIQRAGSGSRRDQARQLIIDLETRGSQALPLFISCLEDTGQDMLASFLRTNRQAAKLSKPTLENLTPVVLRPEIRKPEVLRPETPRPVDIGSGGFGDVGALESLRGNADLAYILSMEPCGHCLIINNVNFCRESGLRTRTGSNIDCEKLRRRFSSLHFMVEVKGDLTAKKMVLALLELAQQDHGALDCCVVVILSHGCQASHLQFPGAVYGTDGCPVSVEKIVNIFNGTSCPSLGGKPKLFFIQASGGEQKDHGFEVASTSPEDESPGSNPEPDATPFQEGLRTFDQLDAISSLPTPSDIFVSYSTFPGFVSWRDPKSGSWYVETLDDIFEQWAHSEDLQSLLLRVANAVSVKGIYKQMPGCFNFLRKKLFFKTS

SEQ ID NO: 266 - protein, 266 aa, Artificial Sequence
  Synthetic
MDEADRRLLRRCRLRLVEELQVDQLWDALLSRELFRPHMIEDIQRAGSGSRRDQARQLIIDLETRGSQALPLFISCLEDTGQDMLASFLRTNRQAAKLSKPTLENLTPVVLRPEIRKPEVLRPETPRPVDIGSGGFGDVEQKDHGFEVASTSPEDESPGSNPEPDATPFQEGLRTFDQLDAISSLPTPSDIFVSYSTFPGFVSWRDPKSGSWYVETLDDIFEQWAHSEDLQSLLLRVANAVSVKGIYKQMPGCFNFLRKKLFFKTS

SEQ ID NO: 267 - protein, 521 aa, Artificial Sequence
  Synthetic
MKSQGQHWYSSSDKNCKVSFREKLLIIDSNLGVQDVENLKFLCIGLVPNKKLEKSSSASDVFEHLLAEDLLSEEDPFFLAELLYIIRQKKLLQHLNCTKEEVERLLPTRQRVSLFRNLLYELSEGIDSENLKDMIFLLKDSLPKTEMTSLSFLAFLEKQGKIDEDNLTCLEDLCKTVVPKLLRNIEKYKREKAIQIVTPPVDKEAESYQGEEELVSQTDVKTFLEALPQESWQNKHAGSNGNRATNGAPSLVSRGMQGASANTLNSETSTKRAAVYRMNRNHRGFCVIVNNHSFTSLKDRQGTHKDAEILSHVFQWLGFTVHIHNNVTKVEMEMVLQKQKCNPAHADGDCFVFCILTHGRFGAVYSSDEALIPIREIMSHFTALQCPRLAEKPKLFFIQACQGEELQPSVSIEADALNPEQAPTSLQDSIPAEADFLLGLATVPGCVSFRHVEEGSWYIQSLCNHLKKLVPRMLKFLEKTMEIRGRKRTVWGAKQISATSLPTAISAQTPRPPMRRWSSVS

SEQ ID NO: 268 - protein, 130 aa, Artificial Sequence
  Synthetic
MDDFEAGAAAGAAPGEEDLCAAFNVICDNVGKDWRRLARQLKVSDTKIDSIEDRYPRNLTERVRESLRIWKNTEKENATVAHLVGALRSCQMNLVADLVQEVQQARDLQNRSGAMSPMSWNSDASTSEAS

SEQ ID NO: 269 - protein, 435 aa, Artificial Sequence
  Synthetic
MSAEVIHQVEEALDTDEKEMLLFLCRDVAIDVVPPNVRDLLDILRERGKLSVGDLAELLYRVRRFDLLKRILKMDRKAVETHLLRNPHLVSDYRVLMAEIGEDLDKSDVSSLIFLMKDYMGRGKISKEKSFLDLVVELEKLNLVAPDQLDLLEKCLKNIHRIDLKTKIQKYKQSVQGAGTSYRNVLQAAIQKSLKDPSNNFRLHNGRSKEQRLKEQLGAQQEPVKKSIQESEAFLPQSIPEERYKMKSKPLGICLIIDCIGNETELLRDTFTSLGYEVQKFLHLSMHGISQILGQFACMPEHRDYDSFVCVLVSRGGSQSVYGVDQTHSGLPLHHIRRMFMGDSCPYLAGKPKMFFIQNYVVSEGQLEDSSLLEVDGPAMKNVEFKAQKRGLCTVHREADFFWSLCTADMSLLEQSHSSPSLYLQCLSQKLRQER

SEQ ID NO: 270 - protein, 239 aa, Artificial Sequence
  Synthetic
MAHAGRTGYDNREIVMKYIHYKLSQRGYEWDAGDVGAAPPGAAPAPGIFSSQPGHTPHPAASRDPVARTSPLQTPAAPGAAAGPALSPVPPVVHLTLRQAGDDFSRRYRRDFAEMSSQLHLTPFTARGRFATVVEELFRDGVNWGRIVAFFEFGGVMCVESVNREMSPLVDNIALWMTEYLNRHLHTWIQDNGGWDAFVELYGPSMRPLFDFSWLSLKTLLSLALVGACITLGAYLGHK

SEQ ID NO: 271 - protein, 706 aa, Artificial Sequence
  Synthetic
MASPADSCIQFTRHASDVLLNLNRLRSRDILTDVVIVVSREQFRAHKTVLMACSGLFYSIFTDQLKCNLSVINLDPEINPEGFCILLDFMYTSRLNLREGNIMAVMATAMYLQMEHVVDTCRKFIKASEAEMVSAIKPPREEFLNSRMLMPQDIMAYRGREVVENNLPLRSAPGCESRAFAPSLYSGLSTPPASYSMYSHLPVSSLLFSDEEFRDVRMPVANPFPKERALPCDSARPVPGEYSRPTLEVSPNVCHSNIYSPKETIPEEARSDMHYSVAEGLKPAAPSARNAPYFPCDKASKEEERPSSEDEIALHFEPPNAPLNRKGLVSPQSPQKSDCQPNSPTESCSSKNACILQASGSPPAKSPTDPKACNWKKYKFIVLNSLNQNAKPEGPEQAELGRLSPRAYTAPPACQPPMEPENLDLQSPTKLSASGEDSTIPQASRLNNIVNRSMTGSPRSSSESHSPLYMHPPKCTSCGSQSPQHAEMCLHTAGPTFPEEMGETQSEYSDSSCENGAFFCNECDCRFSEEASLKRHTLQTHSDKPYKCDRCQASFRYKGNLASHKTVHTGEKPYRCNICGAQFNRPANLKTHTRIHSGEKPYKCETCGARFVQVAHLRAHVLIHTGEKPYPCEICGTRFRHLQTLKSHLRIHTGEKPYHCEKCNLHFRHKSQLRLHLRQKHGAITNTKVQYRVSATDLPPELPKAC

SEQ ID NO: 272 - protein, 970 aa, Artificial Sequence
  Synthetic
MASPADSCIQFTRHASDVLLNLNRLRSRDILTDVVIVVSREQFRAHKTVLMACSGLFYSIFTDQLKCNLSVINLDPEINPEGFCILLDFMYTSRLNLREGNIMAVMATAMYLQMEHVVDTCRKFIKASEAEMVSAIKPPREEFLNSRMLMPQDIMAYRGREVVENNLPLRSAPGCESRAFAPSLYSGLSTPPASYSMYSHLPVSSLLFSDEEFRDVRMPVANPFPKERALPCDSARPVPGEYSRPTLEVSPNVCHSNIYSPKETIPEEARSDMHYSVAEGLKPAAPSARNAPYFPCDKASKEEERPSSEDEIALHFEPPNAPLNRKGLVSPQSPQKSDCQPNSPTESCSSKNACILQASGSPPAKSPTDPKACNWKKYKFIVLNSLNQNAKPEGPEQAELGRLSPRAYTAPPACQPPMEPENLDLQSPTKLSASGEDSTIPQASRLNNIVNRSMTGSPRSSSESHSPLYMHPPKCTSCGSQSPQHAEMCLHTAGPTFPEEMGETQSEYSDSSCENGAFFCNECDCRFSEEASLKRHTLQTHSDKPYKCDRCQASFRYKGNLASHKTVHTGEKPYRCNICGAQFNRPANLKTHTRIHSGEKPYKCETCGARFVQVAHLRAHVLIHTGEKPYPCEICGTRFRHLQTLKSHLRIHTGEKPYHCEKCNLHFRHKSQLRLHLRQKHGAITNTKVQYRVSATDLPPELPKACGSGVKQTLNFDLLKLAGDVESNPGPMAHAGRTGYDNREIVMKYIHYKLSQRGYEWDAGDVGAAPPGAAPAPGIFSSQPGHTPHPAASRDPVARTSPLQTPAAPGAAAGPALSPVPPVVHLTLRQAGDDFSRRYRRDFAEMSSQLHLTPFTARGRFATVVEELFRDGVNWGRIVAFFEFGGVMCVESVNREMSPLVDNIALWMTEYLNRHLHTWIQDNGGWDAFVELYGPSMRPLFDFSWLSLKTLLSLALVGACITLGAYLGHK

SEQ ID NO: 273 - protein, 376 aa, Artificial Sequence; identical to SEQ ID NO: 231
  Synthetic

SEQ ID NO: 274 - protein, 232 aa, Artificial Sequence
  Synthetic
MLGIWTLLPLVLTSVARLSSKSVNAQVTDINSKGLELRKTVTTVETQNLEGLHHDGQFCHKPCPPGERKARDCTVNGDEPDCVPCQEGKEYTDKAHFSSKCRRCRLCDEGHGLEVEINCTRTQNTKCRCKPNFFCNSTVCEHCDPCTKCEHGIIKECTLTSNTKCKEEGSRSNLGWLCLLLLPIPLIVWVKRGRKKLLYIFKQPFMRPVQTTQEEDGCSCRFPEEEEGGCEL

SEQ ID NO: 275 - protein, 273 aa, Artificial Sequence
  Synthetic
MLGIWTLLPLVLTSVARLSSKSVNAQVTDINSKGLELRKTVTTVETQNLEGLHHDGQFCHKPCPPGERKARDCTVNGDEPDCVPCQEGKEYTDKAHFSSKCRRCRLCDEGHGLEVEINCTRTQNTKCRCKPNFFCNSTVCEHCDPCTKCEHGIIKECTLTSNTKCKEEGSRSNLGWLCLLLLPIPLIVWVRSKRSRLLHSDYMNMPPRRPGPTRKHYQPYAPPRDFAAYRSKRGRKKLLYIFKQPFMRPVQTTQEEDGCSCRFPEEEEGGCEL

SEQ ID NO: 276 - protein, 298 aa, Artificial Sequence
  Synthetic
MAPPPARVHLGAFLAVTPNPGSAASGTEAAAATPSKVWGSSAGRIEPRGGGRGALPTSMGQHGPSARARAGRAPGPRPAREASPRLRVHKTFKFVVVGVLLQVVPSSAATIKLHDQSIGTQQWEHSPLGELCPPGSHRSEHPGACNRCTEGVGYTNASNNLFACLPCTACKSDEEERSPCTTTRNTACQCKPGTFRNDNSAEMCRKCSRGCPRGMVKVKDCTPWSDIECVHKESGNGHNLGWLCLLLLPIPLIVWVKRGRKKLLYIFKQPFMRPVQTTQEEDGCSCRFPEEEEGGCEL

SEQ ID NO: 277 - protein, 264 aa, Artificial Sequence
  Synthetic
MEQRPRGCAAVAAALLLVLLGARAQGGTRSPRCDCAGDFHKKIGLFCCRGCPAGHYLKAPCTEPCGNSTCLVCPQDTFLAWENHHNSECARCQACDEQASQVALENCSAVADTRCGCKPGWFVECQVSQCVSSSPFYCQPCLDCGALHRHTRLLCSRRDTDCGTCLPGFYEHGDGCVSCPTSTLGSCPERCAAVCGWRQMFWVQVLLAGLVVPLLLGATLTYKRGRKKLLYIFKQPFMRPVQTTQEEDGCSCRFPEEEEGGCEL

SEQ ID NO: 278 - protein, 412 aa, Artificial Sequence
  Synthetic
MGTSPSSSTALASCSRIARRATATMIAGSLLLLGFLSTTTAQPEQKASNLIGTYRHVDRATGQVLTCDKCPAGTYVSEHCTNTSLRVCSSCPVGTFTRHENGIEKCHDCSQPCPWPMIEKLPCAALTDRECTCPPGMFQSNATCAPHTVCPVGWGVRKKGTETEDVRCKQCARGTFSDVPSSVMKCKAYTDCLSQNLVVIKPGTKETDNVCGTLPSFSSSTSPSPGTAIFPRPEHMETHEVPSSTYVPKGMNSTESNSSASVRPKVLSSIQEGTVPDNTSSARGKEDVNKTLPNLQVVNHQQGPHHRHILKLLPSMEATGGEKSSTPIKGPKRGHPRQNLHKHFDINEHLPWMIVLFLLLVLVVIVVCSIKRGRKKLLYIFKQPFMRPVQTTQEEDGCSCRFPEEEEGGCEL

SEQ ID NO: 279 - protein, 305 aa, Artificial Sequence
  Synthetic
MLGIWTLLPLVLTSVARLSSKSVNAQVTDINSKGLELRKTVTTVETQNLEGLHHDGQFCHKPCPPGERKARDCTVNGDEPDCVPCQEGKEYTDKAHFSSKCRRCRLCDEGHGLEVEINCTRTQNTKCRCKPNFFCNSTVCEHCDPCTKCEHGIIKECTLTSNTKCKEEGSRSNFLFVLLGVGSMGVAAIVWGAWFWGRRSCQQRDSGNSPGNAFYSNVLYRPRGAPKKSEDCSGEGKDQRGQSIYSTSFPQPAPRQPHLASRPCPSPRPCPSPRPGHPVSMVRVSPRPSPTQQPRPKGFPKVGEE

SEQ ID NO: 280 - protein, 232 aa, Artificial Sequence
  Synthetic
MLGIWTLLPLVLTSVARLSSKSVNAQVTDINSKGLELRKTVTTVETQNLEGLHHDGQFCHKPCPPGERKARDCTVNGDEPDCVPCQEGKEYTDKAHFSSKCRRCRLCDEGHGLEVEINCTRTQNTKCRCKPNFFCNSTVCEHCDPCTKCEHGIIKECTLTSNTKCKEEGSRSNFWLPIGCAAFVVVCILGCILICWLTKKKYSSSVHDPNGEYMFMRAVNTAKKSRLTDVTL

SEQ ID NO: 281 - protein, 242 aa, Artificial Sequence
  Synthetic
MLGIWTLLPLVLTSVARLSSKSVNAQVTDINSKGLELRKTVTTVETQNLEGLHHDGQFCHKPCPPGERKARDCTVNGDEPDCVPCQEGKEYTDKAHFSSKCRRCRLCDEGHGLEVEINCTRTQNTKCRCKPNFFCNSTVCEHCDPCTKCEHGIIKECTLTSNTKCKEEGSRSNILVIFSGMFLVFTLAGALFLHQRRKYRSNKGESPVEPAEPCHYSCPREEEGSTIPIQEDYRKPEPACSP

SEQ ID NO: 282 - protein, 236 aa, Artificial Sequence
  Synthetic
MLGIWTLLPLVLTSVARLSSKSVNAQVTDINSKGLELRKTVTTVETQNLEGLHHDGQFCHKPCPPGERKARDCTVNGDEPDCVPCQEGKEYTDKAHFSSKCRRCRLCDEGHGLEVEINCTRTQNTKCRCKPNFFCNSTVCEHCDPCTKCEHGIIKECTLTSNTKCKEEGSRSNVAAILGLGLVLGLLGPLAILLALYLLRRDQRLPPDAHKPPGGGSFRTPIQEEQADAHSTLAKI

SEQ ID NO: 283 - protein, 242 aa, Artificial Sequence
  Synthetic
MLGIWTLLPLVLTSVARLSSKSVNAQVTDINSKGLELRKTVTTVETQNLEGLHHDGQFCHKPCPPGERKARDCTVNGDEPDCVPCQEGKEYTDKAHFSSKCRRCRLCDEGHGLEVEINCTRTQNTKCRCKPNFFCNSTVCEHCDPCTKCEHGIIKECTLTSNTKCKEEGSRSNIISFFLALTSTALLFLLFFLTLRFSVVKRGRKKLLYIFKQPFMRPVQTTQEEDGCSCRFPEEEEGGCEL

SEQ ID NO: 284 - protein, 391 aa, Artificial Sequence
  Synthetic
MLGIWTLLPLVLTSVARLSSKSVNAQVTDINSKGLELRKTVTTVETQNLEGLHHDGQFCHKPCPPGERKARDCTVNGDEPDCVPCQEGKEYTDKAHFSSKCRRCRLCDEGHGLEVEINCTRTQNTKCRCKPNFFCNSTVCEHCDPCTKCEHGIIKECTLTSNTKCKEEGSRSNMFWVQVLLAGLVVPLLLGATLTYTYRHCWPHKPLVTADEAGMEALTPPPATHLSPLDSAHTLLAPPDSSEKICTVQLVGNSWTPGYPETQEALCPQVTWSWDQLPSRALGPAAAPTLSPESPAGSPAMMLQPGPQLYDVMDAVPARRWKEFVRTLGLREAEIEAVEVEIGRFRDQQYEMLKRWRQQQPAGLGAVYAALERMGLDGCVEDLRSRLQRGP

SEQ ID NO: 285 - protein, 412 aa, Artificial Sequence
  Synthetic
MLGIWTLLPLVLTSVARLSSKSVNAQVTDINSKGLELRKTVTTVETQNLEGLHHDGQFCHKPCPPGERKARDCTVNGDEPDCVPCQEGKEYTDKAHFSSKCRRCRLCDEGHGLEVEINCTRTQNTKCRCKPNFFCNSTVCEHCDPCTKCEHGIIKECTLTSNTKCKEEGSRSNIFMYLLTVFLITQMIGSALFAVYLHRRLDKIEDERNLHEDFVFMKTIQRCNTGERSLSLLNCEEIKSQFEGFVKDIMLNKEETKKENSFEMQKGDQNPQIAAHVISEASSKTTSVLQWAEKGYYTMSNNLVTLENGKQLTVKRQGLYYIYAQVTFCSNREASSQAPFIASLCLKSPGRFERILLRAANTHSSAKPCGQQSIHLGGVFELQPGASVFVNVTDPSQVSHGTGFTSFGLLKL

SEQ ID NO: 286 - protein, 376 aa, Artificial Sequence
  Synthetic
MLGIWTLLPLVLTSVARLSSKSVNAQVTDINSKGLELRKTVTTVETQNLEGLHHDGQFCHKPCPPGERKARDCTVNGDEPDCVPCQEGKEYTDKAHFSSKCRRCRLCDEGHGLEVEINCTRTQNTKCRCKPNFFCNSTVCEHCDPCTKCEHGIIKECTLTSNTKCKEEGSRSNVGLGLLLLLMGAGLAVQGWFLLQLHWRLGEMVTRLPDGPAGSWEQLIQERRSHEVNPAAHLTGANSSLTGSGGPLLWETQLGLAFLRGLSYHDGALVVTKAGYYYIYSKVQLGGVGCPLGLASTITHGLYKRTPRYPEELELLVSQQSPCGRATSSSRVWWDSSFLGGVVHLEAGEKVVVRVLDERLVRLRDGTRSYFGAFMV

SEQ ID NO: 287 - protein, 254 aa, Artificial Sequence
  Synthetic
MLGIWTLLPLVLTSVARLSSKSVNAQVTDINSKGLELRKTVTTVETQNLEGLHHDGQFCHKPCPPGERKARDCTVNGDEPDCVPCQEGKEYTDKAHFSSKCRRCRLCDEGHGLEVEINCTRTQNTKCRCKPNFFCNSTVCEHCDPCTKCEHGIIKECTLTSNTKCKEEGSRSNWWFLSGSLVIVIVCSTVGLIICVKRRKPRGDVVKVIVSVQRKRQEAEGEATVIEALQAPPDVTTVAVEETIPSFTGRSPNH

SEQ ID NO: 288 - protein, 389 aa, Artificial Sequence
  Synthetic
MLGIWTLLPLVLTSVARLSSKSVNAQVTDINSKGLELRKTVTTVETQNLEGLHHDGQFCHKPCPPGERKARDCTVNGDEPDCVPCQEGKEYTDKAHFSSKCRRCRLCDEGHGLEVEINCTRTQNTKCRCKPNFFCNSTVCEHCDPCTKCEHGIIKECTLTSNTKCKEEGSRSNPVLDAGPVLFWVILVLVVVVGSSAFLLCHRRACRKRIRQKLHLCYPVQTSQPKLELVDSRPRRSSTQLRSGASVTEPVAEERGLMSQPLMETCHSVGAAYLESLPLQDASPAGGPSSPRDLPEPRVSTEHTNNKIEKIYIMKADTVIVGTVKAELPEGRGLAGPAEPELEEELEADHTPHYPEQETEPPLGSCSDVMLSVEEEGKEDPLPTAASGK

SEQ ID NO: 289 - protein, 252 aa, Artificial Sequence
  Synthetic
MLGIWTLLPLVLTSVARLSSKSVNAQVTDINSKGLELRKTVTTVETQNLEGLHHDGQFCHKPCPPGERKARDCTVNGDEPDCVPCQEGKEYTDKAHFSSKCRRCRLCDEGHGLEVEINCTRTQNTKCRCKPNFFCNSTVCEHCDPCTKCEHGIIKECTLTSNTKCKEEGSRSNLGWLTVVLLAVAACVLLLTSAQLGLHIWQLRSQCMWPRETQLLLEVPPSTEDARSCQFPEEERGERSAEEKGRLGDLWV

SEQ ID NO: 290 - protein, 338 aa, Artificial Sequence
  Synthetic
MLGIWTLLPLVLTSVARLSSKSVNAQVTDINSKGLELRKTVTTVETQNLEGLHHDGQFCHKPCPPGERKARDCTVNGDEPDCVPCQEGKEYTDKAHFSSKCRRCRLCDEGHGLEVEINCTRTQNTKCRCKPNFFCNSTVCEHCDPCTKCEHGIIKECTLTSNTKCKEEGSRSNPFFFCCFIAVAMGIRFIIMVAIWSAVFLNSLFNQEVQIPLTESYCGPCPKNWICYKNNCYQFFDESKNWYESQASCMSQNASLLKVYSKEDQDLLKLVKSYHWMGLVHIPTNGSWQWEDGSILSPNLLTIIEMQKGDCALYASSFKGYIENCSTPNTYICMQRTV

SEQ ID NO: 291 - protein, 255 aa, Artificial Sequence
  Synthetic
MLGIWTLLPLVLTSVARLSSKSVNAQVTDINSKGLELRKTVTTVETQNLEGLHHDGQFCHKPCPPGERKARDCTVNGDEPDCVPCQEGKEYTDKAHFSSKCRRCRLCDEGHGLEVEINCTRTQNTKCRCKPNFFCNSTVCEHCDPCTKCEHGIIKECTLTSNTKCKEEGSRSNGGTVLLLLFVISITTIIVIFLNRRRRRERRDLFTESWDTQKAPNNYRSPISTSQPTNQSMDDTREDIYVNYPTFSRRPKTRV

SEQ ID NO: 292 - protein, 271 aa, Artificial Sequence
  Synthetic
MLGIWTLLPLVLTSVARLSSKSVNAQVTDINSKGLELRKTVTTVETQNLEGLHHDGQFCHKPCPPGERKARDCTVNGDEPDCVPCQEGKEYTDKAHFSSKCRRCRLCDEGHGLEVEINCTRTQNTKCRCKPNFFCNSTVCEHCDPCTKCEHGIIKECTLTSNTKCKEEGSRSNWAVYAGLLGGVIMILIMVVILQLRRRGKTNHYQTTVEKKSLTIYAQVQKPGPLQKKLDSFPAQDPCTTIYVAATEPVPESVQETNSITVYASVTLPES

SEQ ID NO: 293 - protein, 242 aa, Artificial Sequence
  Synthetic
MLGIWTLLPLVLTSVARLSSKSVNAQVTDINSKGLELRKTVTTVETQNLEGLHHDGQFCHKPCPPGERKARDCTVNGDEPDCVPCQEGKEYTDKAHFSSKCRRCRLCDEGHGLEVEINCTRTQNTKCRCKPNFFCNSTVCEHCDPCTKCEHGIIKECTLTSNTKCKEEGSRSNIYAGVCISVLVLLALLGVIIAKKYFFKKEVQQLSVSFSSLQIKALQNAVEKEVQAEDNIYIENSLYATD

SEQ ID NO: 294 - protein, 294 aa, Artificial Sequence
  Synthetic
MLGIWTLLPLVLTSVARLSSKSVNAQVTDINSKGLELRKTVTTVETQNLEGLHHDGQFCHKPCPPGERKARDCTVNGDEPDCVPCQEGKEYTDKAHFSSKCRRCRLCDEGHGLEVEINCTRTQNTKCRCKPNFFCNSTVCEHCDPCTKCEHGIIKECTLTSNTKCKEEGSRSNIWLIVGICIALFALPFVIYAAKVFLRCINYVFFPSLKPSSSIDEYFSEQPLKNLLLSTSEEQIEKCFIIENISTIATVEETNQTDEDHKKYSSQTSQDSGNYSNEDESESKTSEELQQDFV

SEQ ID NO: 295 - protein, 445 aa, Artificial Sequence
  Synthetic
MLGIWTLLPLVLTSVARLSSKSVNAQVTDINSKGLELRKTVTTVETQNLEGLHHDGQFCHKPCPPGERKARDCTVNGDEPDCVPCQEGKEYTDKAHFSSKCRRCRLCDEGHGLEVEINCTRTQNTKCRCKPNFFCNSTVCEHCDPCTKCEHGIIKECTLTSNTKCKEEGSRSNIGGIITVFLIALVLTSTIVTLKWIGYICLRNSLPKVLNFHNFLAWPFPNLPPLEAMDMVEVIYINRKKKVWDYNYDDESDSDTEAAPRTSGGGYTMHGLTVRPLGQASATSTESQLIDPESEEEPDLPEVDVELPTMPKDSPQQLELLSGPCERRKSPLQDPFPEEDYSSTEGSGGRITFNVDLNSVFLRVLDDEDSDDLEAPLMLSSHLEEMVDPEDPDNVQSNHLLASGEGTQPTFPSPSSEGLWSEDAPSDQSDTSESDVDLGDGYIMR

SEQ ID NO: 296 - protein, 553 aa, Artificial Sequence
  Synthetic
MLGIWTLLPLVLTSVARLSSKSVNAQVTDINSKGLELRKTVTTVETQNLEGLHHDGQFCHKPCPPGERKARDCTVNGDEPDCVPCQEGKEYTDKAHFSSKCRRCRLCDEGHGLEVEINCTRTQNTKCRCKPNFFCNSTVCEHCDPCTKCEHGIIKECTLTSNTKCKEEGSRSNIYAGVCISVLVLLALLGVIIAKVFLRCINYVFFPSLKPSSSIDEYFSEQPLKNLLLSTSEEQIEKCFIIENISTIATVEETNQTDEDHKKYSSQTSQDSGNYSNEDESESKTSEELQQDFVGGGSGGGSKWIGYICLRNSLPKVLNFHNFLAWPFPNLPPLEAMDMVEVIYINRKKKVWDYNYDDESDSDTEAAPRTSGGGYTMHGLTVRPLGQASATSTESQLIDPESEEEPDLPEVDVELPTMPKDSPQQLELLSGPCERRKSPLQDPFPEEDYSSTEGSGGRITFNVDLNSVFLRVLDDEDSDDLEAPLMLSSHLEEMVDPEDPDNVQSNHLLASGEGTQPTFPSPSSEGLWSEDAPSDQSDTSESDVDLGDGYIMR

SEQ ID NO: 297 - protein, 512 aa, Artificial Sequence
  Synthetic
MLGIWTLLPLVLTSVARLSSKSVNAQVTDINSKGLELRKTVTTVETQNLEGLHHDGQFCHKPCPPGERKARDCTVNGDEPDCVPCQEGKEYTDKAHFSSKCRRCRLCDEGHGLEVEINCTRTQNTKCRCKPNFFCNSTVCEHCDPCTKCEHGIIKECTLTSNTKCKEEGSRSNIYAGVCISVLVLLALLGVIIANRAARHLCPPLPTPCASSAIEFPGGKETWQWINPVDFQEEASLQEALVVEMSWDKGERTEPLEKTELPEGAPELALDTELSLEDGDRCKAKMGGSGGGSHYFQQKVFVLLAALRPQWCSREIPDPANSTCAKKYPIAEEKTQLPLDRLLIDWPTPEDPEPLVISEVLHQVTPVFRHPPCSNWPQREKGIQGHQASEKDMMHSASSPPPPRALQAESRQLVDLYKVLESRGSDPKPENPACPWTVLPAGDLPTHDGYLPSNIDDLPSHEAPLADSLEELEPQHISLSVFPSSSLHPLTFSCGDKLTLDQLKMRCDSLML

SEQ ID NO: 298 - protein, 236 aa, Artificial Sequence
  Synthetic
MLGIWTLLPLVLTSVARLSSKSVNAQVTDINSKGLELRKTVTTVETQNLEGLHHDGQFCHKPCPPGERKARDCTVNGDEPDCVPCQEGKEYTDKAHFSSKCRRCRLCDEGHGLEVEINCTRTQNTKCRCKPNFFCNSTVCEHCDPCTKCEHGIIKECTLTSNTKCKEEGSRSNLCYILDAILFLYGIVLTLLYCRLKIQVRKAAITSYEKSDGVYTGLSTRNQETYETLKHEKPPQ

SEQ ID NO: 299 - protein, 273 aa, Artificial Sequence
  Synthetic
MEQRGQNAPAASGARKRHGPGPREARGARPGPRVPKTLVLVVAAVLLLVSAESALITQQDLAPQQRAAPQQKRSSPSEGLCPPGHHISEDGRDCISCKYGQDYSTHWNDLLFCLRCTRCDSGEVELSPCTTTRNTVCQCEEGTFREEDSPEMCRKCRTGCPRGMVKVGDCTPWSDIECVHKESGTKHSGEVPAVEETVTSSPGTPASPCSLSGIIIGVTVAAVVLIVAVFVKRGRKKLLYIFKQPFMRPVQTTQEEDGCSCRFPEEEEGGCEL

SEQ ID NO: 300 - protein, 292 aa, Artificial Sequence
  Synthetic
MGLSTVPDLLLPLVLLELLVGIYPSGVIGLVPHLGDREKRDSVCPQGKYIHPQNNSICCTKCHKGTYLYNDCPGPGQDTDCRECESGSFTASENHLRHCLSCSKCRKEMGQVEISSCTVDRDTVCGCRKNQYRHYWSENLFQCFNCSLCLNGTVHLSCQEKQNTVCTCHAGFFLRENECVSCSNCKKSLECTKLCLPQIENVKGTEDSGTTVLLPLVIFFGLCLLSLLFIGLCVKRRKPRGDVVKVIVSVQRKRQEAEGEATVIEALQAPPDVTTVAVEETIPSFTGRSPNH

SEQ ID NO: 301 - protein, 281 aa, Artificial Sequence
  Synthetic
MGLSTVPDLLLPLVLLELLVGIYPSGVIGLVPHLGDREKRDSVCPQGKYIHPQNNSICCTKCHKGTYLYNDCPGPGQDTDCRECESGSFTASENHLRHCLSCSKCRKEMGQVEISSCTVDRDTVCGCRKNQYRHYWSENLFQCFNCSLCLNGTVHLSCQEKQNTVCTCHAGFFLRENECVSCSNCKKSLECTKLCLPQIENVKGTEDSGTTVLLPLVIFFGLCLLSLLFIGLHQRRKYRSNKGESPVEPAEPCHYSCPREEEGSTIPIQEDYRKPEPACSP

SEQ ID NO: 302 - protein, 276 aa, Artificial Sequence
  Synthetic
MGLSTVPDLLLPLVLLELLVGIYPSGVIGLVPHLGDREKRDSVCPQGKYIHPQNNSICCTKCHKGTYLYNDCPGPGQDTDCRECESGSFTASENHLRHCLSCSKCRKEMGQVEISSCTVDRDTVCGCRKNQYRHYWSENLFQCFNCSLCLNGTVHLSCQEKQNTVCTCHAGFFLRENECVSCSNCKKSLECTKLCLPQIENVKGTEDSGTTVLLPLVIFFGLCLLSLLFIGLCVKRGRKKLLYIFKQPFMRPVQTTQEEDGCSCRFPEEEEGGCEL

SEQ ID NO: 303 - protein, 342 aa, Artificial Sequence
  Synthetic
MAVMAPRTLVLLLSGALALTQTWAQVQLVQSGAEVKKPGASVKVSCKASGYTFTSYYIHWVRQAPGQGLEWIGCIYPGNVNTNYNEKFKDRATLTVDTSISTAYMELSRLRSDDTAVYFCTRSHYGLDWNFDVWGQGTTVTVSSGGGGSGGGGSGGGGSGGDIQMTQSPSSLSASVGDRVTITCHASQNIYVWLNWYQQKPGKAPKLLIYKASNLHTGVPSRFSGSGSGTDFTLTISSLQPEDFATYYCQQGQTYPYTFGGGTKVEIKGGGGSIISFFLALTSTALLFLLFFLTLRFSVVKRGRKKLLYIFKQPFMRPVQTTQEEDGCSCRFPEEEEGGCEL

SEQ ID NO: 304 - protein, 491 aa, Artificial Sequence
  Synthetic
MAVMAPRTLVLLLSGALALTQTWAQVQLVQSGAEVKKPGASVKVSCKASGYTFTSYYIHWVRQAPGQGLEWIGCIYPGNVNTNYNEKFKDRATLTVDTSISTAYMELSRLRSDDTAVYFCTRSHYGLDWNFDVWGQGTTVTVSSGGGGSGGGGSGGGGSGGDIQMTQSPSSLSASVGDRVTITCHASQNIYVWLNWYQQKPGKAPKLLIYKASNLHTGVPSRFSGSGSGTDFTLTISSLQPEDFATYYCQQGQTYPYTFGGGTKVEIKGGGGSMFWVQVLLAGLVVPLLLGATLTYTYRHCWPHKPLVTADEAGMEALTPPPATHLSPLDSAHTLLAPPDSSEKICTVQLVGNSWTPGYPETQEALCPQVTWSWDQLPSRALGPAAAPTLSPESPAGSPAMMLQPGPQLYDVMDAVPARRWKEFVRTLGLREAEIEAVEVEIGRFRDQQYEMLKRWRQQQPAGLGAVYAALERMGLDGCVEDLRSRLQRGP

SEQ ID NO: 305 - protein, 512 aa, Artificial Sequence
  Synthetic
MAVMAPRTLVLLLSGALALTQTWAQVQLVQSGAEVKKPGASVKVSCKASGYTFTSYYIHWVRQAPGQGLEWIGCIYPGNVNTNYNEKFKDRATLTVDTSISTAYMELSRLRSDDTAVYFCTRSHYGLDWNFDVWGQGTTVTVSSGGGGSGGGGSGGGGSGGDIQMTQSPSSLSASVGDRVTITCHASQNIYVWLNWYQQKPGKAPKLLIYKASNLHTGVPSRFSGSGSGTDFTLTISSLQPEDFATYYCQQGQTYPYTFGGGTKVEIKGGGGSIFMYLLTVFLITQMIGSALFAVYLHRRLDKIEDERNLHEDFVFMKTIQRCNTGERSLSLLNCEEIKSQFEGFVKDIMLNKEETKKENSFEMQKGDQNPQIAAHVISEASSKTTSVLQWAEKGYYTMSNNLVTLENGKQLTVKRQGLYYIYAQVTFCSNREASSQAPFIASLCLKSPGRFERILLRAANTHSSAKPCGQQSIHLGGVFELQPGASVFVNVTDPSQVSHGTGFTSFGLLKL

SEQ ID NO: 306 - protein, 332 aa, Artificial Sequence
  Synthetic
MAVMAPRTLVLLLSGALALTQTWAQVQLVQSGAEVKKPGASVKVSCKASGYTFTSYYIHWVRQAPGQGLEWIGCIYPGNVNTNYNEKFKDRATLTVDTSISTAYMELSRLRSDDTAVYFCTRSHYGLDWNFDVWGQGTTVTVSSGGGGSGGGGSGGGGSGGDIQMTQSPSSLSASVGDRVTITCHASQNIYVWLNWYQQKPGKAPKLLIYKASNLHTGVPSRFSGSGSGTDFTLTISSLQPEDFATYYCQQGQTYPYTFGGGTKVEIKGGGGSFWLPIGCAAFVVVCILGCILICWLTKKKYSSSVHDPNGEYMFMRAVNTAKKSRLTDVTL

SEQ ID NO: 307 - protein, 336 aa, Artificial Sequence
  Synthetic
MAVMAPRTLVLLLSGALALTQTWAQVQLVQSGAEVKKPGASVKVSCKASGYTFTSYYIHWVRQAPGQGLEWIGCIYPGNVNTNYNEKFKDRATLTVDTSISTAYMELSRLRSDDTAVYFCTRSHYGLDWNFDVWGQGTTVTVSSGGGGSGGGGSGGGGSGGDIQMTQSPSSLSASVGDRVTITCHASQNIYVWLNWYQQKPGKAPKLLIYKASNLHTGVPSRFSGSGSGTDFTLTISSLQPEDFATYYCQQGQTYPYTFGGGTKVEIKGGGGSVAAILGLGLVLGLLGPLAILLALYLLRRDQRLPPDAHKPPGGGSFRTPIQEEQADAHSTLAKI

SEQ ID NO: 308 - protein, 476 aa, Artificial Sequence
  Synthetic
MAVMAPRTLVLLLSGALALTQTWAQVQLVQSGAEVKKPGASVKVSCKASGYTFTSYYIHWVRQAPGQGLEWIGCIYPGNVNTNYNEKFKDRATLTVDTSISTAYMELSRLRSDDTAVYFCTRSHYGLDWNFDVWGQGTTVTVSSGGGGSGGGGSGGGGSGGDIQMTQSPSSLSASVGDRVTITCHASQNIYVWLNWYQQKPGKAPKLLIYKASNLHTGVPSRFSGSGSGTDFTLTISSLQPEDFATYYCQQGQTYPYTFGGGTKVEIKGGGGSVGLGLLLLLMGAGLAVQGWFLLQLHWRLGEMVTRLPDGPAGSWEQLIQERRSHEVNPAAHLTGANSSLTGSGGPLLWETQLGLAFLRGLSYHDGALVVTKAGYYYIYSKVQLGGVGCPLGLASTITHGLYKRTPRYPEELELLVSQQSPCGRATSSSRVWWDSSFLGGVVHLEAGEKVVVRVLDERLVRLRDGTRSYFGAFMV

SEQ ID NO: 309 - protein, 489 aa, Artificial Sequence
  Synthetic
MAVMAPRTLVLLLSGALALTQTWAQVQLVQSGAEVKKPGASVKVSCKASGYTFTSYYIHWVRQAPGQGLEWIGCIYPGNVNTNYNEKFKDRATLTVDTSISTAYMELSRLRSDDTAVYFCTRSHYGLDWNFDVWGQGTTVTVSSGGGGSGGGGSGGGGSGGDIQMTQSPSSLSASVGDRVTITCHASQNIYVWLNWYQQKPGKAPKLLIYKASNLHTGVPSRFSGSGSGTDFTLTISSLQPEDFATYYCQQGQTYPYTFGGGTKVEIKGGGGSPVLDAGPVLFWVILVLVVVVGSSAFLLCHRRACRKRIRQKLHLCYPVQTSQPKLELVDSRPRRSSTQLRSGASVTEPVAEERGLMSQPLMETCHSVGAAYLESLPLQDASPAGGPSSPRDLPEPRVSTEHTNNKIEKIYIMKADTVIVGTVKAELPEGRGLAGPAEPELEEELEADHTPHYPEQETEPPLGSCSDVMLSVEEEGKEDPLPTAASGK

SEQ ID NO: 310 - protein, 352 aa, Artificial Sequence
  Synthetic
MAVMAPRTLVLLLSGALALTQTWAQVQLVQSGAEVKKPGASVKVSCKASGYTFTSYYIHWVRQAPGQGLEWIGCIYPGNVNTNYNEKFKDRATLTVDTSISTAYMELSRLRSDDTAVYFCTRSHYGLDWNFDVWGQGTTVTVSSGGGGSGGGGSGGGGSGGDIQMTQSPSSLSASVGDRVTITCHASQNIYVWLNWYQQKPGKAPKLLIYKASNLHTGVPSRFSGSGSGTDFTLTISSLQPEDFATYYCQQGQTYPYTFGGGTKVEIKGGGGSLGWLTVVLLAVAACVLLLTSAQLGLHIWQLRSQCMWPRETQLLLEVPPSTEDARSCQFPEEERGERSAEEKGRLGDLWV

SEQ ID NO: 311 - protein, 438 aa, Artificial Sequence
  Synthetic
MAVMAPRTLVLLLSGALALTQTWAQVQLVQSGAEVKKPGASVKVSCKASGYTFTSYYIHWVRQAPGQGLEWIGCIYPGNVNTNYNEKFKDRATLTVDTSISTAYMELSRLRSDDTAVYFCTRSHYGLDWNFDVWGQGTTVTVSSGGGGSGGGGSGGGGSGGDIQMTQSPSSLSASVGDRVTITCHASQNIYVWLNWYQQKPGKAPKLLIYKASNLHTGVPSRFSGSGSGTDFTLTISSLQPEDFATYYCQQGQTYPYTFGGGTKVEIKGGGGSPFFFCCFIAVAMGIRFIIMVAIWSAVFLNSLFNQEVQIPLTESYCGPCPKNWICYKNNCYQFFDESKNWYESQASCMSQNASLLKVYSKEDQDLLKLVKSYHWMGLVHIPTNGSWQWEDGSILSPNLLTIIEMQKGDCALYASSFKGYIENCSTPNTYICMQRTV

SEQ ID NO: 312 - protein, 355 aa, Artificial Sequence
  Synthetic
MAVMAPRTLVLLLSGALALTQTWAQVQLVQSGAEVKKPGASVKVSCKASGYTFTSYYIHWVRQAPGQGLEWIGCIYPGNVNTNYNEKFKDRATLTVDTSISTAYMELSRLRSDDTAVYFCTRSHYGLDWNFDVWGQGTTVTVSSGGGGSGGGGSGGGGSGGDIQMTQSPSSLSASVGDRVTITCHASQNIYVWLNWYQQKPGKAPKLLIYKASNLHTGVPSRFSGSGSGTDFTLTISSLQPEDFATYYCQQGQTYPYTFGGGTKVEIKGGGGSGGTVLLLLFVISITTIIVIFLNRRRRRERRDLFTESWDTQKAPNNYRSPISTSQPTNQSMDDTREDIYVNYPTFSRRPKTRV

SEQ ID NO: 313 - protein, 371 aa, Artificial Sequence
  Synthetic
MAVMAPRTLVLLLSGALALTQTWAQVQLVQSGAEVKKPGASVKVSCKASGYTFTSYYIHWVRQAPGQGLEWIGCIYPGNVNTNYNEKFKDRATLTVDTSISTAYMELSRLRSDDTAVYFCTRSHYGLDWNFDVWGQGTTVTVSSGGGGSGGGGSGGGGSGGDIQMTQSPSSLSASVGDRVTITCHASQNIYVWLNWYQQKPGKAPKLLIYKASNLHTGVPSRFSGSGSGTDFTLTISSLQPEDFATYYCQQGQTYPYTFGGGTKVEIKGGGGSWAVYAGLLGGVIMILIMVVILQLRRRGKTNHYQTTVEKKSLTIYAQVQKPGPLQKKLDSFPAQDPCTTIYVAATEPVPESVQETNSITVYASVTLPES

SEQ ID NO: 314 - protein, 342 aa, Artificial Sequence
  Synthetic
MAVMAPRTLVLLLSGALALTQTWAQVQLVQSGAEVKKPGASVKVSCKASGYTFTSYYIHWVRQAPGQGLEWIGCIYPGNVNTNYNEKFKDRATLTVDTSISTAYMELSRLRSDDTAVYFCTRSHYGLDWNFDVWGQGTTVTVSSGGGGSGGGGSGGGGSGGDIQMTQSPSSLSASVGDRVTITCHASQNIYVWLNWYQQKPGKAPKLLIYKASNLHTGVPSRFSGSGSGTDFTLTISSLQPEDFATYYCQQGQTYPYTFGGGTKVEIKGGGGSIYAGVCISVLVLLALLGVIIAKKYFFKKEVQQLSVSFSSLQIKALQNAVEKEVQAEDNIYIENSLYATD

SEQ ID NO: 315 - protein, 342 aa, Artificial Sequence
  Synthetic
MAVMAPRTLVLLLSGALALTQTWAQVQLVQSGAEVKKPGASVKVSCKASGYTFTSYYIHWVRQAPGQGLEWIGCIYPGNVNTNYNEKFKDRATLTVDTSISTAYMELSRLRSDDTAVYFCTRSHYGLDWNFDVWGQGTTVTVSSGGGGSGGGGSGGGGSGGDIQMTQSPSSLSASVGDRVTITCHASQNIYVWLNWYQQKPGKAPKLLIYKASNLHTGVPSRFSGSGSGTDFTLTISSLQPEDFATYYCQQGQTYPYTFGGGTKVEIKGGGGSILVIFSGMFLVFTLAGALFLHQRRKYRSNKGESPVEPAEPCHYSCPREEEGSTIPIQEDYRKPEPACSP

SEQ ID NO: 316 - protein, 354 aa, Artificial Sequence
  Synthetic
MAVMAPRTLVLLLSGALALTQTWAQVQLVQSGAEVKKPGASVKVSCKASGYTFTSYYIHWVRQAPGQGLEWIGCIYPGNVNTNYNEKFKDRATLTVDTSISTAYMELSRLRSDDTAVYFCTRSHYGLDWNFDVWGQGTTVTVSSGGGGSGGGGSGGGGSGGDIQMTQSPSSLSASVGDRVTITCHASQNIYVWLNWYQQKPGKAPKLLIYKASNLHTGVPSRFSGSGSGTDFTLTISSLQPEDFATYYCQQGQTYPYTFGGGTKVEIKGGGGSWWFLSGSLVIVIVCSTVGLIICVKRRKPRGDVVKVIVSVQRKRQEAEGEATVIEALQAPPDVTTVAVEETIPSFTGRSPNH

SEQ ID NO: 317 - protein, 405 aa, Artificial Sequence
  Synthetic
MAVMAPRTLVLLLSGALALTQTWAQVQLVQSGAEVKKPGASVKVSCKASGYTFTSYYIHWVRQAPGQGLEWIGCIYPGNVNTNYNEKFKDRATLTVDTSISTAYMELSRLRSDDTAVYFCTRSHYGLDWNFDVWGQGTTVTVSSGGGGSGGGGSGGGGSGGDIQMTQSPSSLSASVGDRVTITCHASQNIYVWLNWYQQKPGKAPKLLIYKASNLHTGVPSRFSGSGSGTDFTLTISSLQPEDFATYYCQQGQTYPYTFGGGTKVEIKGGGGSFLFVLLGVGSMGVAAIVWGAWFWGRRSCQQRDSGNSPGNAFYSNVLYRPRGAPKKSEDCSGEGKDQRGQSIYSTSFPQPAPRQPHLASRPCPSPRPCPSPRPGHPVSMVRVSPRPSPTQQPRPKGFPKVGEE

SEQ ID NO: 318 - protein, 341 aa, Artificial Sequence
  Synthetic
MAVMAPRTLVLLLSGALALTQTWAQVQLVQSGAEVKKPGASVKVSCKASGYTFTSYYIHWVRQAPGQGLEWIGCIYPGNVNTNYNEKFKDRATLTVDTSISTAYMELSRLRSDDTAVYFCTRSHYGLDWNFDVWGQGTTVTVSSGGGGSGGGGSGGGGSGGDIQMTQSPSSLSASVGDRVTITCHASQNIYVWLNWYQQKPGKAPKLLIYKASNLHTGVPSRFSGSGSGTDFTLTISSLQPEDFATYYCQQGQTYPYTFGGGTKVEIKGGGGSFWVLVVVGGVLACYSLLVTVAFIIFWVRSKRSRLLHSDYMNMPPRRPGPTRKHYQPYAPPRDFAAYRS

SEQ ID NO: 319 - protein, 278 aa, Artificial Sequence
  Synthetic
MQSGTHWRVLGLCLLSVGVWGQGVTLFVALYDYEARGLNRMFDLSFHKGEKFQILSFETGDWWEARSLTTGETGYIPSNYVAPVDSIQGGGGSDGNEEMGGITQTPYKVSISGTTVILTCPQYPGSEILWQHNDKNIGGDEDDKNIGSDEDHLSLKEFSELEQSGYYVCYPRGSKPEDANFYLYLRARVCENCMEMDVMSVATIVIVDICITGGLLLLVYYWSKNRKAKAKPVTRGAGAGGRQRGQNKERPPPVPNPDYEPIRKGQRDLYSGLNQRRI

SEQ ID NO: 320 - protein, 243 aa, Artificial Sequence
  Synthetic
MQSGTHWRVLGLCLLSVGVWGQGVTLFVALYDYEARGLNRMFDLSFHKGEKFQILSFETGDWWEARSLTTGETGYIPSNYVAPVDSIQGGGGSFKIPIEELEDRVFVNCNTSITWVEGTVGTLLSDITRLDLGKRILDPRGIYRCNGTDIYKDKESTVQVHYRMCQSCVELDPATVAGIIVTDVIATLLLALGVFCFAGHETGRLSGAADTQALLRNDQVYQPLRDRDDAQYSHLGGNWARNK

SEQ ID NO: 321 - protein, 253 aa, Artificial Sequence
  Synthetic
MQSGTHWRVLGLCLLSVGVWGQGVTLFVALYDYEARGLNRMFDLSFHKGEKFQILSFETGDWWEARSLTTGETGYIPSNYVAPVDSIQGGGGSQSIKGNHLVKVYDYQEDGSVLLTCDAEAKNITWFKDGKMIGFLTEDKKKWNLGSNAKDPRGMYQCKGSQNKSKPLQVYYRMCQNCIELNAATISGFLFAEIVSIFVLAVGVYFIAGQDGVRQSRASDKQTLLPNDQLYQPLKDREDDQYSHLQGNQLRRN

SEQ ID NO: 322 - protein, 678 aa, Artificial Sequence
  Synthetic
QECTKFKVSSCRECIESGPGCTWCQKLNFTGPGDPDSIRCDTRPQLLMRGCAADDIMDPTSLAETQEDHNGGQKQLSPQKVTLYLRPGQAAAFNVTFRRAKGYPIDLYYLMDLSYSMLDDLRNVKKLGGDLLRALNEITESGRIGFGSFVDKTVLPFVNTHPDKLRNPCPNKEKECQPPFAFRHVLKLTNNSNQFQTEVGKQLISGNLDAPEGGLDAMMQVAACPEEIGWRNVTRLLVFATDDGFHFAGDGKLGAILTPNDGRCHLEDNLYKRSNEFDYPSVGQLAHKLAENNIQPIFAVTSRMVKTYEKLTEIIPKSAVGELSEDSSNVVQLIKNAYNKLSSRVFLDHNALPDTLKVTYDSFCSNGVTHRNQPRGDCDGVQINVPITFQVKVTATECIQEQSFVIRALGFTDIVTVQVLPQCECRCRDQSRDRSLCHGKGFLECGICRCDTGYIGKNCECQTQGRSSQELEGSCRKDNNSIICSGLGDCVCGQCLCHTSDVPGKLIYGQYCECDTINCERYNGQVCGGPGRGLCFCGKCRCHPGFEGSACQCERTTEGCLNPRRVECSGRGRCRCNVCECHSGYQLPLCQECPGCPSPCGKYISCAECLKFEKGPFGKNCSAACPGLQLSNNPVKGRTCKERDSEGCWVAYTLEQQDGMDRYLIYVDESRECVAGPN

SEQ ID NO: 323 - protein, 148 aa, Artificial Sequence
  Synthetic
QVTDINSKGLELRKTVTTVETQNLEGLHHDGQFCHKPCPPGERKARDCTVNGDEPDCVPCQEGKEYTDKAHFSSKCRRCRLCDEGHGLEVEINCTRTQNTKCRCKPNFFCNSTVCEHCDPCTKCEHGIIKECTLTSNTKCKEEGSRSN

SEQ ID NO: 324 - protein, 361 aa, Artificial Sequence
  Synthetic
FPQDRPFEDTCHGNPSHYYDKAVRRCCYRCPMGLFPTQQCPQRPTDCRKQCEPDYYLDEADRCTACVTCSRDDLVEKTPCAWNSSRVCECRPGMFCSTSAVNSCARCFFHSVCPAGMIVKFPGTAQKNTVCEPASPGVSPACASPENCKEPSSGTIPQAKPTPVSPATSSASTMPVRGGTRLAQEAASKLTRAPDSPSSVGRPSSDPGLSPTQPCPEGSGDCRKQCEPDYYLDEAGRCTACVSCSRDDLVEKTPCAWNSSRTCECRPGMICATSATNSCARCVPYPICAAETVTKPQDMAEKDTTFEAPPLGTQPDCNPTPENGEAPASTSPTQSLLVDSQASKTLPIPTSAPVALSSTGK

SEQ ID NO: 325 - protein, 216 aa, Artificial Sequence
  Synthetic
ASGTEAAAATPSKVWGSSAGRIEPRGGGRGALPTSMGQHGPSARARAGRAPGPRPAREASPRLRVHKTFKFVVVGVLLQVVPSSAATIKLHDQSIGTQQWEHSPLGELCPPGSHRSEHPGACNRCTEGVGYTNASNNLFACLPCTACKSDEEERSPCTTTRNTACQCKPGTFRNDNSAEMCRKCSRGCPRGMVKVKDCTPWSDIECVHKESGNGHN

SEQ ID NO: 326 - protein, 155 aa, Artificial Sequence
  Synthetic
ITQQDLAPQQRAAPQQKRSSPSEGLCPPGHHISEDGRDCISCKYGQDYSTHWNDLLFCLRCTRCDSGEVELSPCTTTRNTVCQCEEGTFREEDSPEMCRKCRTGCPRGMVKVGDCTPWSDIECVHKESGTKHSGEVPAVEETVTSSPGTPASPCS

SEQ ID NO: 327 - protein, 141 aa, Artificial Sequence
  Synthetic
ESGDCRQQEFRDRSGNCVPCNQCGPGMELSKECGFGYGEDAQCVTCRLHRFKEDWGFQKCKPCLDCAVVNRFQKANCSATSDAICGDCLPGFYRKTKLVGFQDMECVPCGDPPPPYEPHCASKVNLVKIASTASSPRDTAL

SEQ ID NO: 328 - protein, 308 aa, Artificial Sequence
  Synthetic
QPEQKASNLIGTYRHVDRATGQVLTCDKCPAGTYVSEHCTNTSLRVCSSCPVGTFTRHENGIEKCHDCSQPCPWPMIEKLPCAALTDRECTCPPGMFQSNATCAPHTVCPVGWGVRKKGTETEDVRCKQCARGTFSDVPSSVMKCKAYTDCLSQNLVVIKPGTKETDNVCGTLPSFSSSTSPSPGTAIFPRPEHMETHEVPSSTYVPKGMNSTESNSSASVRPKVLSSIQEGTVPDNTSSARGKEDVNKTLPNLQVVNHQQGPHHRHILKLLPSMEATGGEKSSTPIKGPKRGHPRQNLHKHFDINEH

SEQ ID NO: 329 - protein, 126 aa, Artificial Sequence [sequence omitted]

SEQ ID NO: 330 - protein, 182 aa, Artificial Sequence
  Synthetic
LVPHLGDREKRDSVCPQGKYIHPQNNSICCTKCHKGTYLYNDCPGPGQDTDCRECESGSFTASENHLRHCLSCSKCRKEMGQVEISSCTVDRDTVCGCRKNQYRHYWSENLFQCFNCSLCLNGTVHLSCQEKQNTVCTCHAGFFLRENECVSCSNCKKSLECTKLCLPQIENVKGTEDSGTT

SEQ ID NO: 331 - protein, 133 aa, Artificial Sequence
  Synthetic
QVSHRYPRIQSIKVQFTEYKKEKGFILTSQKEDEIMKVQNNSVIINCDGFYLISLKGYFSQEVNISLHYQKDEEPLFQLKKVRSVNSLMVASLTYKDKVYLNVTTDNTSLDDFHVNGGELILIHQNPGEFCVL

SEQ ID NO: 332 - protein, 215 aa, Artificial Sequence
  Synthetic
HRRLDKIEDERNLHEDFVFMKTIQRCNTGERSLSLLNCEEIKSQFEGFVKDIMLNKEETKKENSFEMQKGDQNPQIAAHVISEASSKTTSVLQWAEKGYYTMSNNLVTLENGKQLTVKRQGLYYIYAQVTFCSNREASSQAPFIASLCLKSPGRFERILLRAANTHSSAKPCGQQSIHLGGVFELQPGASVFVNVTDPSQVSHGTGFTSFGLLKL

SEQ ID NO: 333 - protein, 205 aa, Artificial Sequence
  Synthetic
ACPWAVSGARASPGSAASPRLREGPELSPDDPAGLLDLRQGMFAQLVAQNVLLIDGPLSWYSDPGLAGVSLTGGLSYKEDTKELVVAKAGVYYVFFQLELRRVVAGEGSGSVSLALHLQPLRSAAGAAALALTVDLPPASSEARNSAFGFQGRLLHLSAGQRLGVHLHTEARARHAWQLTQGATVLGLFRVTPEIPAGLPSPRSE

SEQ ID NO: 334 - protein, 238 aa, Artificial Sequence [sequence omitted]

SEQ ID NO: 335 - protein, 249 aa, Artificial Sequence
  Synthetic
YFRAQMDPNRISEDGTHCIYRILRLHENADFQDTTLESQDTKLIPDSCRRIKQAFQGAVQKELQHIVGSQHIRAEKAMVDGSWLDLAKRSKLEAQPFAHLTINATDIPSGSHKVSLSSWYHDRGWAKISNMTFSNGKLIVNQDGFYYLYANICFRHHETSGDLATEYLQLMVYVTKTSIKIPSSHTLMKGGSTKYWSGNSEFHFYSINVGGFFKLRSGEEISIEVSNPSLLDPDQDATYFGAFKVRDID

SEQ ID NO: 336 - protein, 182 aa, Artificial Sequence
  Synthetic
LQLHWRLGEMVTRLPDGPAGSWEQLIQERRSHEVNPAAHLTGANSSLTGSGGPLLWETQLGLAFLRGLSYHDGALVVTKAGYYYIYSKVQLGGVGCPLGLASTITHGLYKRTPRYPEELELLVSQQSPCGRATSSSRVWWDSSFLGGVVHLEAGEKVVVRVLDERLVRLRDGTRSYFGAFMV

SEQ ID NO: 337 - protein, 218 aa, Artificial Sequence
  Synthetic
QVAALQGDLASLRAELQGHHAEKLPAGAGAPKAGLEEAPAVTAGLKIFEPPAPGEGNSSQNSRNKRAVQGPEETVTQDCLQLIADSETPTIQKGSYTFVPWLLSFKRGSALEEKENKILVKETGYFFIYGQVLYTDKTYAMGHLIQRKKVHVFGDELSLVTLFRCIQNMPETLPNNSCYSAGIAKLEEGDELQLAIPRENAQISLDGDVTFFGALKLL

SEQ ID NO: 338 - protein, 224 aa, Artificial Sequence
  Synthetic
APLKIQAYFNETADLPCQFANSQNQSLSELVVFWQDQENLVLNEVYLGKEKFDSVHSKYMGRTSFDSDSWTLRLHNLQIKDKGLYQCIIHHKKPTGMIRIHQMNSELSVLANFSQPEIVPISNITENVYINLTCSSIHGYPEPKKMSVLLRTKNSTIEYDGVMQKSQDNVTELYDVSISLSVSFPDVTSNMTIFCILETDKTRLLSSPFSIELEDPQPPPDHIP

SEQ ID NO: 339 - protein, 208 aa, Artificial Sequence [sequence omitted]

SEQ ID NO: 340 - protein, 249 aa, Artificial Sequence
  Synthetic
QVQLVQSGAEVKKPGASVKVSCKASGYTFTSYYIHWVRQAPGQGLEWIGCIYPGNVNTNYNEKFKDRATLTVDTSISTAYMELSRLRSDDTAVYFCTRSHYGLDWNFDVWGQGTTVTVSSGGGGSGGGGSGGGGSGGDIQMTQSPSSLSASVGDRVTITCHASQNIYVWLNWYQQKPGKAPKLLIYKASNLHTGVPSRFSGSGSGTDFTLTISSLQPEDFATYYCQQGQTYPYTFGGGTKVEIKGGGGS

SEQ ID NO: 341 - protein, 42 aa, Artificial Sequence
  Synthetic
ALYLLRRDQRLPPDAHKPPGGGSFRTPIQEEQADAHSTLAKI

SEQ ID NO: 342 - protein, 62 aa, Artificial Sequence
  Synthetic
KKVAKKPTNKAPHPKQEPQEINFPDDLPGSNTAAPVQETLHGCQPVTQEDGKESRISVQERQ

SEQ ID NO: 343 - protein, 48 aa, Artificial Sequence
  Synthetic
QRRKYRSNKGESPVEPAEPCHYSCPREEEGSTIPIQEDYRKPEPACSP

SEQ ID NO: 344 - protein, 42 aa, Artificial Sequence
  Synthetic
KRGRKKLLYIFKQPFMRPVQTTQEEDGCSCRFPEEEEGGCEL

SEQ ID NO: 345 - protein, 383 aa, Artificial Sequence
  Synthetic
CYRKKGKALTANLWHWINEACGRLSGDKESSGDSCVSTHTANFGQQGACEGVLLLTLEEKTFPEDMCYPDQGGVCQGTCVGGGPYAQGEDARMLSLVSKTEIEEDSFRQMPTEDEYMDRPSQPTDQLLFLTEPGSKSTPPFSEPLEVGENDSLSQCFTGTQSTVGSESCNCTEPLCRTDWTPMSSENYLQKEVDSGHCPHWAASPSPNWADVCTGCRNPPGEDCEPLVGSPKRGPLPQCAYGMGLPPEEEASRTEARDQPEDGADGRLPSSARAGAGSGSSPGGQSPASGNVTGNSNSTFISSGQVMNFKGDIIVVYVSQTSQEGAAAAAEPMGRPVQEETLARRDSFAGNGPRFPDPCGGPEGLREPEKASRPVQEQGGAKA

SEQ ID NO: 346 - protein, 107 aa, Artificial Sequence
  Synthetic
KKRGDPCSCQPRSRPRQSPAKSSQDHAMEAGSPVSTSPEPVETCSFCFPECRAPTQESAVTPGTPDPTCAGRWGCHTRTTVLQPCPHIPDSGLGIVCVPAQEGGPGA

SEQ ID NO: 347 - protein, 85 aa, Artificial Sequence
  Synthetic
SWRRRQRRLRGASSAEAPDGDKDAPEPLDKVIILSPGISDATAPAWPPPGEDPGTTPPGHSVPVPATELGSTELVTTKTAGPEQQ

SEQ ID NO: 348 - protein, 60 aa, Artificial Sequence
  Synthetic
CVKRRKPRGDVVKVIVSVQRKRQEAEGEATVIEALQAPPDVTTVAVEETIPSFTGRSPNH

SEQ ID NO: 349 - protein, 107 aa, Artificial Sequence
  Synthetic
RKINSEPLKDEFKNTGSGLLGMANIDLEKSRTGDEIILPRGLEYTVEECTCEDCIKSKPKVDSDHCFPLPAMEEGATILVTTKTNDYCKSLPAALSATEIEKSISAR

SEQ ID NO: 350 - protein, 58 aa, Artificial Sequence
  Synthetic
QLGLHIWQLRSQCMWPRETQLLLEVPPSTEDARSCQFPEEERGERSAEEKGRLGDLWV

SEQ ID NO: 351 - protein, 41 aa, Artificial Sequence
  Synthetic
RSKRSRLLHSDYMNMTPRRPGPTRKHYQPYAPPRDFAAYRS

SEQ ID NO: 352 - protein, 41 aa, Artificial Sequence
  Synthetic
RSKRSRLLHSDYMNMPPRRPGPTRKHYQPYAPPRDFAAYRS

SEQ ID NO: 353 - protein, 111 aa, Artificial Sequence
  Synthetic
FWGRRSCQQRDSGNSPGNAFYSNVLYRPRGAPKKSEDCSGEGKDQRGQSIYSTSFPQPAPRQPHLASRPCPSPRPCPSPRPGHPVSMVRVSPRPSPTQQPRPKGFPKVGEE

SEQ ID NO: 354 - protein, 38 aa, Artificial Sequence
  Synthetic
CWLTKKKYSSSVHDPNGEYMFMRAVNTAKKSRLTDVTL

SEQ ID NO: 355 - protein, 61 aa, Artificial Sequence
  Synthetic
NRRRRRERRDLFTESWDTQKAPNNYRSPISTSQPTNQSMDDTREDIYVNYPTFSRRPKTRV

SEQ ID NO: 356 - protein, 77 aa, Artificial Sequence
  Synthetic
QLRRRGKTNHYQTTVEKKSLTIYAQVQKPGPLQKKLDSFPAQDPCTTIYVAATEPVPESVQETNSITVYASVTLPES

SEQ ID NO: 357 - protein, 48 aa, Artificial Sequence
  Synthetic
KKYFFKKEVQQLSVSFSSLQIKALQNAVEKEVQAEDNIYIENSLYATD

SEQ ID NO: 358 - protein, 100 aa, Artificial Sequence
  Synthetic
KVFLRCINYVFFPSLKPSSSIDEYFSEQPLKNLLLSTSEEQIEKCFIIENISTIATVEETNQTDEDHKKYSSQTSQDSGNYSNEDESESKTSEELQQDFV

SEQ ID NO: 359 - protein, 251 aa, Artificial Sequence
  Synthetic
KWIGYICLRNSLPKVLNFHNFLAWPFPNLPPLEAMDMVEVIYINRKKKVWDYNYDDESDSDTEAAPRTSGGGYTMHGLTVRPLGQASATSTESQLIDPESEEEPDLPEVDVELPTMPKDSPQQLELLSGPCERRKSPLQDPFPEEDYSSTEGSGGRITFNVDLNSVFLRVLDDEDSDDLEAPLMLSSHLEEMVDPEDPDNVQSNHLLASGEGTQPTFPSPSSEGLWSEDAPSDQSDTSESDVDLGDGYIMR

SEQ ID NO: 360 - protein, 286 aa, Artificial Sequence
  Synthetic
NCRNTGPWLKKVLKCNTPDPSKFFSQLSSEHGGDVQKWLSSPFPSSSFSPGGLAPEISPLEVLERDKVTQLLLQQDKVPEPASLSSNHSLTSCFTNQGYFFFHLPDALEIEACQVYFTYDPYSEEDPDEGVAGAPTGSSPQPLQPLSGEDDAYCTFPSRDDLLLFSPSLLGGPSPPSTAPGGSGAGEERMPPSLQERVPRDWDPQPLGPPTPGVPDLVDFQPPPELVLREAGEEVPDAGPREGVSFPWSRPPGQGEFRALNARLPLNTDAYLSLQELQGQDPTHLV

SEQ ID NO: 361 - protein, 86 aa, Artificial Sequence
  Synthetic
ERTMPRIPTLKNLEDLVTEYHGNFSAWSGVSKGLAESLQPDYSERLCLVSEIPPKGGALGEGPGASPCNQHSPYWAPPCYTLKPET

SEQ ID NO: 362 - protein, 36 aa, Artificial Sequence
  Synthetic
EESVVRPSVFVVDGQTDIPFTRLGRSHRRQSCSVAR

SEQ ID NO: 363 - protein, 50 aa, Artificial Sequence
  Synthetic
GWIRGRRSRHSWEMSEFHNYNLDLKKSDFSTRWQKQRCPVVKSKCRENAS

SEQ ID NO: 364 - protein, 21 aa, Artificial Sequence
  Synthetic
IETYNQTSPRSAATGLPISMK

SEQ ID NO: 365 - protein, 21 aa, Artificial Sequence
  Synthetic
FLFVLLGVGSMGVAAIVWGAW

SEQ ID NO: 366 - protein, 21 aa, Artificial Sequence
  Synthetic
FWLPIGCAAFVVVCILGCILI

SEQ ID NO: 367 - protein, 21 aa, Artificial Sequence
  Synthetic
ILVIFSGMFLVFTLAGALFLH

SEQ ID NO: 368 - protein, 21 aa, Artificial Sequence
  Synthetic
GGTVLLLLFVISITTIIVIFL

SEQ ID NO: 369 - protein, 21 aa, Artificial Sequence
  Synthetic
WAVYAGLLGGVIMILIMVVIL

SEQ ID NO: 370 - protein, 21 aa, Artificial Sequence
  Synthetic
IYAGVCISVLVLLALLGVIIA

SEQ ID NO: 371 - protein, 21 aa, Artificial Sequence
  Synthetic
IWLIVGICIALFALPFVIYAA

SEQ ID NO: 372 - protein, 21 aa, Artificial Sequence
  Synthetic
IGGIITVFLIALVLTSTIVTL

SEQ ID NO: 373 - protein, 21 aa, Artificial Sequence
  Synthetic
VAAILGLGLVLGLLGPLAILL

SEQ ID NO: 374 - protein, 22 aa, Artificial Sequence
  Synthetic
ALVVIPIIFGILFAILLVLVFI

SEQ ID NO: 375 - protein, 27 aa, Artificial Sequence
  Synthetic
IISFFLALTSTALLFLLFFLTLRFSVV

SEQ ID NO: 376 - protein, 21 aa, Artificial Sequence
  Synthetic
GLIILLLFASVALVAAIIFGV

SEQ ID NO: 377 - protein, 21 aa, Artificial Sequence
  Synthetic
TLGLCLCAVLCCFLVAVACFL

SEQ ID NO: 378 - protein, 21 aa, Artificial Sequence
  Synthetic
FGAPALLGLALVLALVLVGLV

SEQ ID NO: 379 - protein, 21 aa, Artificial Sequence
  Synthetic
WWFLSGSLVIVIVCSTVGLII

SEQ ID NO: 380 - protein, 23 aa, Artificial Sequence
  Synthetic
ILWTCLGLSLIISLAVFVLMFLL

SEQ ID NO: 381 - protein, 21 aa, Artificial Sequence
  Synthetic
LGWLTVVLLAVAACVLLLTSA

SEQ ID NO: 382 - protein, 21 aa, Artificial Sequence
  Synthetic
PFFFCCFIAVAMGIRFIIMVA

SEQ ID NO: 383 - protein, 21 aa, Artificial Sequence
  Synthetic
VGLGLLLLLMGAGLAVQGWFL

SEQ ID NO: 384 - protein, 24 aa, Artificial Sequence
  Synthetic
IFMYLLTVFLITQMIGSALFAVYL

SEQ ID NO: 385 - protein, 21 aa, Artificial Sequence
  Synthetic
FLLWILAAVSSGLFFYSFLLT

SEQ ID NO: 386 - protein, 23 aa, Artificial Sequence
  Synthetic
IAAIVGGTVAGIVLIGILLLVIW

SEQ ID NO: 387 - protein, 17 aa, Artificial Sequence
  Synthetic
LGWLCLLLLPIPLIVWV

SEQ ID NO: 388 - protein, 28 aa, Artificial Sequence
  Synthetic
PVLDAGPVLFWVILVLVVVVGSSAFLLC

SEQ ID NO: 389 - protein, 23 aa, Artificial Sequence
  Synthetic
IWVILVVTLVVPLLLVAVLIVCC

SEQ ID NO: 390 - protein, 21 aa, Artificial Sequence
  Synthetic
LSGIIIGVTVAAVVLIVAVFV

SEQ ID NO: 391 - protein, 21 aa, Artificial Sequence
  Synthetic
AAVICSALATVLLALLILCVI

SEQ ID NO: 392 - protein, 21 aa, Artificial Sequence
  Synthetic
LPWMIVLFLLLVLVVIVVCSI

SEQ ID NO: 393 - protein, 21 aa, Artificial Sequence
  Synthetic
MFWVQVLLAGLVVPLLLGATL

SEQ ID NO: 394 - protein, 21 aa, Artificial Sequence
  Synthetic
VLLPLVIFFGLCLLSLLFIGL

SEQ ID NO: 395 - protein, 27 aa, Artificial Sequence
  Synthetic
FWVLVVVGGVLACYSLLVTVAFIIFWV

SEQ ID NO: 396 - protein, 21 aa, Artificial Sequence
  Synthetic
IYIWAPLAGTCGVLLLSLVIT

SEQ ID NO: 397 - DNA, 328 bp, Artificial Sequence
  Synthetic
cagtgttcttcaacctgtgttccgcggaaccctagggttccacccaaaggctttcggggttccgcgagtcattgcttcaattcgagagacgtcggccgcgccgctcttcagaatgcacatgcgtcaatcggagtttcatgttgaaacatgttatccattcgcatagttgacttacactgcacttaaccttaattttcaaaaatatgtaactgtacttgtggtcgtagttttgttgttgttttaggtttagacaagcaaaggtaagttaacttacagttttaaaataaattgtattttgtttgatcctaacctagaatcgttcagaaat

SEQ ID NO: 398 - DNA, 145 bp, Artificial Sequence
  Synthetic
ccaaagcacgggctcaccttgttcgtaacaagtcaacgcagctgtccctaaaatctcatctgggtgtattactaaatgaagggttccataaaaaaaaatatctcgacaaagggttccgccggatggcaaaggttgaagaacactg

SEQ ID NO: 399 - DNA, 16 bp, Artificial Sequence
  Synthetic
cagtgttcttcaacct

SEQ ID NO: 400 - DNA, 16 bp, Artificial Sequence
  Synthetic
aggttgaagaacactg

SEQ ID NO: 401 - protein, 636 aa, Artificial Sequence
  Synthetic
MMLNWLKSGKLESQSQEQSSCYLENSNCLPPTLDSTDIIGEENKAGTTSRKKRKYDEDYLNFGFTWTGDKDEPNGLCVICEQVVNNSSLNPAKLKRHLDTKHPTLKGKSEYFKRKCNELNQKKHTFERYVRDDNKNLLKASYLVSLRIAKQGEAYTIAEKLIKPCTKDLTTCVFGEKFASKVDLVPLSDTTISRRIEDMSYFCEAVLVNRLKNAKCGFTLQMDESTDVAGLAILLVFVRYIHESSFEEDMLFCKALPTQTTGEEIFNLLNAYFEKHSIPWNLCYHICTDGAKAMVGVIKGVIARIKKLVPDIKASHCCLHRHALAVKRIPNALHEVLNDAVKMINFIKSRPLNARVFALLCDDLGSLHKNLLLHTEVRWLSRGKVLTRFWELRDEIRIFFNEREFAGKLNDTSWLQNLAYIADIFSYLNEVNLSLQGPNSTIFKVNSRINSIKSKLKLWEECITKNNTECFANLNDFLETSNTALDPNLKSNILEHLNGLKNTFLEYFPPTCNNISWVENPFNECGNVDTLPIKEREQLIDIRTDTTLKSSFVPDGIGPFWIKLMDEFPEISKRAVKELMPFVTTYLCEKSFSVYVATKTKYRNRLDAEDDMRLQLTTIHPDIDNLCNNKQAQKSH

1.-59. (canceled)

60. A polynucleotide, comprising:
a first nucleotide sequence encoding a chimeric antigen receptor comprising an extracellular domain that specifically binds to a CD19 antigen; and
a second nucleotide sequence encoding either an apoptosis inhibitor selected from the group consisting of SEQ ID NOs: 237, 238, and 271 or an activating mutant consisting of SEQ ID NO. 251.

61. The polynucleotide of claim 60, wherein the second nucleotide sequence encodes an apoptosis inhibitor consisting of SEQ ID NO: 237.

62. The polynucleotide of claim 60, wherein the second nucleotide sequence encodes an apoptosis inhibitor consisting of SEQ ID NO: 238.

63. The polynucleotide of claim 60, wherein the second nucleotide sequence encodes an activating mutant consisting of SEQ ID NO. 251.

64. The polynucleotide of claim 60, further comprising a transposon.

65. The polynucleotide of claim 64, wherein:
(A) the second nucleotide sequence is operably linked to a heterologous promoter; and
(B) the polynucleotide is flanked by a pair of transposon ends.

66. The polynucleotide of claim 60, further comprising a lentiviral vector.

67. A T cell expressing a polynucleotide, the polynucleotide comprising:
a first nucleotide sequence encoding a chimeric antigen receptor comprising an extracellular domain that specifically binds to a CD19 antigen; and
a second nucleotide sequence encoding either an apoptosis inhibitor selected from the group consisting of SEQ ID NOs: 237, 238, and 271 or an activating mutant consisting of SEQ ID NO. 251.

68. The T cell of claim 67, wherein the second nucleotide sequence encodes an apoptosis inhibitor consisting of SEQ ID NO: 237.

69. The T cell of claim 67, wherein the second nucleotide sequence encodes an apoptosis inhibitor consisting of SEQ ID NO: 238.

70. The T cell of claim 67, wherein the second nucleotide sequence encodes an activating mutant consisting of SEQ ID NO. 251.

71. The T cell of claim 67, wherein:
a persistence of the T cell is increased relative to a persistence of a T cell that does not comprise the first and second nucleotide sequences; and/or
a proliferation rate of the T cell is increased relative to a proliferation rate of a T cell that does not comprise the first and second nucleotide sequences.

72. The T cell of claim 67, wherein the polynucleotide is integrated into the genome of the T cell.

73. The T cell of claim 67 for use in the treatment of cancer.

74. The T cell of claim 67 for use in the treatment of a B cell malignancy.

75. A kit, comprising:
(A) a polynucleotide, comprising:
(1) a first nucleotide sequence encoding a chimeric antigen receptor comprising an extracellular domain that specifically binds to a CD19 antigen;
(2) a second nucleotide sequence encoding either an apoptosis inhibitor selected from the group consisting of SEQ ID NOs: 237, 238, and 271 or an activating mutant consisting of SEQ ID NO. 251; and
(3) a transposon; and
(B) a transposase capable of transposing the transposon or a nucleic acid encoding a transposase capable of transposing the transposon.

76. The kit of claim 75, wherein the second nucleotide sequence encodes an apoptosis inhibitor consisting of SEQ ID NO: 237.

77. The kit of claim 75, wherein the second nucleotide sequence encodes an apoptosis inhibitor consisting of SEQ ID NO: 238.

78. The kit of claim 75, wherein the second nucleotide sequence encodes an activating mutant consisting of SEQ ID NO. 251.

79. The kit of claim 75, further comprising an anti-hCD19-CD3 bispecific T cell engager.

80. The kit of claim 75, wherein, when the kit comprises a nucleic acid encoding the transposase, the nucleic acid encoding the transposase is an mRNA.
